(19) United States
(12) Patent Application Publication
(10) Pub. No.: US 2023/0357770 A1
(43) Pub. Date: Nov. 9, 2023

(54) COMPOUNDS AND METHODS FOR REDUCING APOE EXPRESSION

(71) Applicant: Ionis Pharmaceuticals, Inc., Carlsbad, CA (US)

(72) Inventors: Tracy A. Cole, Encinitas, CA (US); Swagatam Mukhopadhyay, Oceanside, CA (US); Huynh-Hoa Bui, San Diego, CA (US); Priyam Singh, San Diego, CA (US); Holly Kordasiewicz, San Diego, CA (US); Susan M. Freier, San Diego, CA (US); Hien Thuy Zhao, San Diego, CA (US)

(73) Assignee: Ionis Pharmaceuticals, Inc., Carlsbad, CA (US)

(21) Appl. No.: 18/246,468

(22) PCT Filed: Sep. 23, 2021
(86) PCT No.: PCT/US2021/051822

§ 371 Date: Mar. 23, 2023

Related U.S. Application Data
(60) Provisional application No. 63/083,006, filed on Sep. 24, 2020.

(51) Int. Cl. C12N 15/113; C12N 9/22; A61K 38/46; A61K 31/713; A61P 25/28

(52) U.S. Cl. CPC C12N 15/113; C12N 9/22; C12Y 301/26004; A61K 38/465; A61K 31/713; A61P 25/28; C12N 2310/14; C12N 2310/321; C12N 2310/313; C12N 2310/3233; C12N 2310/3341; C12N 2310/341; C12N 2310/3231; C12N 2310/3519; C12N 2310/346; C12N 2310/345

(57) ABSTRACT

Provided are compounds, methods, and pharmaceutical compositions for reducing the amount or activity of APOE RNA in a cell or animal, and in certain instances reducing the amount of APOE protein in a cell or animal Such compounds, methods, and pharmaceutical compositions are useful to ameliorate at least one symptom or hallmark of a neurodegenerative disease. Such symptoms and hallmarks include cognitive impairment, progressive memory loss, behavioral abnormality, dementia, difficulty performing daily activities, amyloid plaques, neurofibrillary tangles, and neuroinflammation.

### SEQUENCE LISTING

[0001] The present application is being filed along with a Sequence Listing in electronic format. The Sequence Listing is provided as a file entitled BIOL0394WOSEQ_ST25.txt, created on Sep. 23, 2021, which is 597 KB in size. The information in the electronic format of the sequence listing is incorporated herein by reference in its entirety.

### FIELD

[0002] Provided are compounds, methods, and pharmaceutical compositions for reducing the amount or activity of APOE RNA in a cell or animal, and in certain instances reducing the amount of APOE protein in a cell or animal. Certain such compounds, methods, and pharmaceutical compositions are useful to ameliorate at least one symptom or hallmark of a neurodegenerative disease. Such symptoms and hallmarks include cognitive impairment, progressive memory loss, behavioral abnormality, dementia, difficulty performing daily activities, amyloid plaques, neurofibrillary tangles, and neuroinflammation. Such neurodegenerative diseases include Alzheimer's Disease.

### BACKGROUND

[0003] Alzheimer's Disease (AD) is the most common cause of age-associated dementia, affecting an estimated 5.7 million Americans a year (Alzheimer's Association. 2018 Alzheimer's Disease Facts and Figures. Alzheimer's Dement. 2018; 14(3):367-429). Symptoms of AD include cognitive impairment, a decline in memory and language skills, behavioral and psychological symptoms such as apathy and lack of motivation, gait disturbances and seizures, and dementia. Hallmarks of AD include the presence of amyloid plaques and neurofibrillary tangles in the brains of patients. Amyloid plaques are toxic aggregates composed mainly of peptides that are encoded by the amyloid precursor protein gene, APP. Neurofibrillary tangles are hyperphosphorylated, insoluble aggregates of tau proteins.

[0004] Apolipoprotein E (APOE) is a fat-binding protein that is associated with lipoprotein particles. APOE is produced mainly by the liver. APOE is also produced in the brain by astrocytes, where it plays a role in transporting cholesterol to neurons via APOE receptors. There are three main APOE alleles that encode three different APOE protein isoforms: APOE-ε2, APOE-ε3, and APOE-ε4. These alleles encode for APOE protein variants having different combinations of amino acids at positions 112 and 158 of the APOE protein: APOE-ε2 (Cys112, Cys158), APOE-ε3 (Cys112, Arg158), and APOE-ε4 (Arg112, Arg158). These amino acid differences result in variable APOE structure and function.

[0005] APOE has been linked to pathological hallmarks of AD (e.g., amyloid plaques and neurofibrillary tangles), and to pathways including synaptic plasticity, lipid transport, glucose metabolism, mitochondrial function, and vascular integrity. Polymorphisms in the APOE promoter result in increased APOE promoter activity and APOE protein levels, and an increased risk for developing AD. The APOE4 allele, encoding isoform ε4, is the strongest genetic risk factor for late-onset Alzheimer's disease. Patients homozygous for the APOE4 allele account for about 16% of AD population.

[0006] Currently there is a lack of acceptable options for treating neurodegenerative diseases such as AD. It is therefore an object herein to provide compounds, methods, and pharmaceutical compositions for the treatment of such diseases.

### SUMMARY OF THE INVENTION

[0007] Provided herein are compounds, methods and pharmaceutical compositions for reducing the amount or activity of APOE RNA, and in certain embodiments reducing the amount of APOE protein in a cell or animal. In certain embodiments, the animal has a neurodegenerative disease. In certain embodiments, the animal has Alzheimer's Disease (AD). In certain embodiments, compounds useful for reducing expression of APOE RNA are oligomeric compounds. In certain embodiments, compounds useful for reducing expression of APOE RNA are modified oligonucleotides.

[0008] Also provided are methods useful for ameliorating at least one symptom or hallmark of a neurodegenerative disease. In certain embodiments, the neurodegenerative disease is Alzheimer's Disease. In certain embodiments, the symptom or hallmark includes cognitive impairment, progressive memory loss, behavioral abnormality, dementia, difficulty performing daily activities, amyloid plaques, neurofibrillary tangles, and neuroinflammation.

### DETAILED DESCRIPTION OF THE INVENTION

[0009] It is to be understood that both the foregoing general description and the following detailed description are exemplary and explanatory only and are not restrictive. Herein, the use of the singular includes the plural unless specifically stated otherwise. As used herein, the use of “or” means “and/or” unless stated otherwise. Furthermore, the use of the term “including” as well as other forms, such as “includes” and “included”, is not limiting. Also, terms such as “element” or “component” encompass both elements and components comprising one unit and elements and components that comprise more than one subunit, unless specifically stated otherwise.

[0010] The section headings used herein are for organizational purposes only and are not to be construed as limiting the subject matter described. All documents, or portions of documents, cited in this application, including, but not limited to, patents, patent applications, articles, books, and treatises, are hereby expressly incorporated-by-reference for the portions of the document discussed herein, as well as in their entirety.

### Definitions

[0011] Unless specific definitions are provided, the nomenclature used in connection with, and the procedures and techniques of, analytical chemistry, synthetic organic chemistry, and medicinal and pharmaceutical chemistry described herein are those well-known and commonly used in the art. Where permitted, all patents, applications, published applications and other publications and other data referred to throughout in the disclosure are incorporated by reference herein in their entirety.

[0012] Unless otherwise indicated, the following terms have the following meanings:

### Definitions

[0013] As used herein, “2′-deoxynucleoside” means a nucleoside comprising a 2′-H(H) deoxyribosyl sugar moiety. In certain embodiments, a 2′-deoxynucleoside is a 2′-β-D-deoxynucleoside and comprises a 2′-β-D-deoxyribosyl sugar moiety, which has the β-D configuration as found in naturally occurring deoxyribonucleic acids (DNA). In certain embodiments, a 2′-deoxynucleoside or a nucleoside comprising an unmodified 2′-deoxyribosyl sugar moiety may comprise a modified nucleobase or may comprise an RNA nucleobase (uracil).

[0014] As used herein, “2′-substituted nucleoside” means a nucleoside comprising a 2′-substituted sugar moiety. As used herein, “2′-substituted” in reference to a sugar moiety means a sugar moiety comprising at least one 2′-substituent group other than H or OH.

[0015] As used herein, “3′ target site” refers to the 3′-most nucleotide of a target nucleic acid which is complementary to an antisense oligonucleotide, when the antisense oligonucleotide is hybridized to the target nucleic acid.

[0016] As used herein, “5′ target site” refers to the 5′-most nucleotide of a target nucleic acid which is complementary to an antisense oligonucleotide, when the antisense oligonucleotide is hybridized to the target nucleic acid.

[0017] As used herein, “5-methyl cytosine” means a cytosine modified with a methyl group attached to the 5 position. A 5-methyl cytosine is a modified nucleobase.

[0018] As used herein, “abasic sugar moiety” means a sugar moiety of a nucleoside that is not attached to a nucleobase. Such abasic sugar moieties are sometimes referred to in the art as “abasic nucleosides.”

[0019] As used herein, “administration” or “administering” means providing a pharmaceutical agent or composition to an animal.

[0020] As used herein, “amyloid plaque” means an aggregate of peptides that are encoded by a human amyloid precursor protein gene, APP.

[0021] As used herein, “animal” and “subject” are used interchangeably and the terms mean a human or non-human animal.

[0022] As used herein, “antisense activity” means any detectable and/or measurable change attributable to the hybridization of an antisense compound to its target nucleic acid. In certain embodiments, antisense activity is a decrease in the amount or expression of a target nucleic acid or protein encoded by such target nucleic acid compared to target nucleic acid levels or target protein levels in the absence of the antisense compound.

[0023] As used herein, “antisense agent” means an antisense compound and optionally one or more additional features, such as a sense compound.

[0024] As used herein, “antisense compound” means an antisense oligonucleotide and optionally one or more additional features, such as a conjugate group.

[0025] As used herein, “sense compound” means a sense oligonucleotide and optionally one or more additional features, such as a conjugate group.

[0026] As used herein, “antisense oligonucleotide” means an oligonucleotide, including the oligonucleotide portion of an antisense compound, that is capable of hybridizing to a target nucleic acid and is capable of at least one antisense activity. Antisense oligonucleotides include but are not limited to antisense RNAi oligonucleotides and antisense RNase H oligonucleotides.

[0027] As used herein, “sense oligonucleotide” means an oligonucleotide, including the oligonucleotide portion of a sense compound, that is capable of hybridizing to an antisense oligonucleotide.

[0028] As used herein, “ameliorate” in reference to a treatment means improvement in at least one symptom relative to the same symptom in the absence of the treatment. In certain embodiments, amelioration is the reduction in the severity or frequency of a symptom or the delayed onset or slowing of progression in the severity or frequency of a symptom. In certain embodiments, the symptom or hallmark is cognitive impairment, progressive memory loss, behavioral abnormality, dementia, difficulty performing daily activities, amyloid plaques, neurofibrillary tangles, and neuroinflammation.

[0029] As used herein, “behavioral abnormality” means a behavior exhibited by a subject that is atypical or out of the ordinary for the subject. In certain embodiments, the behavior abnormality is selected from depression, anxiety, panic, phobia, paranoia, and a combination thereof. In certain embodiments, the behavior abnormality is a dysfunctional or deviant behavior (e.g., causes distress for others).

[0030] As used herein, “bicyclic nucleoside” or “BNA” means a nucleoside comprising a bicyclic sugar moiety.

[0031] As used herein, “bicyclic sugar” or “bicyclic sugar moiety” means a modified sugar moiety comprising two rings, wherein the second ring is formed via a bridge connecting two of the atoms in the first ring thereby forming a bicyclic structure. In certain embodiments, the first ring of the bicyclic sugar moiety is a furanosyl moiety. In certain embodiments, the bicyclic sugar moiety does not comprise a furanosyl moiety.

[0032] As used herein, “blunt” or “blunt ended” in reference to a duplex formed by two oligonucleotides mean that there are no terminal unpaired nucleotides (i.e. no overhanging nucleotides). One or both ends of a double-stranded RNAi agent can be blunt.

[0033] As used herein, “cell-targeting moiety” means a conjugate group or portion of a conjugate group that is capable of binding to a particular cell type or particular cell types.

[0034] As used herein, “cerebrospinal fluid” or “CSF” means the fluid filling the space around the brain and spinal cord. “Artificial cerebrospinal fluid” or “aCSF” means a prepared or manufactured fluid that has certain properties of cerebrospinal fluid.

[0035] As used herein, “cleavable moiety” means a bond or group of atoms that is cleaved under physiological conditions, for example, inside a cell, an animal, or a human. As used herein, “cognitive impairment” means confusion, poor motor coordination, loss of short-term memory, loss of long-term memory, identity confusion, impaired judgment, or any combination thereof.

[0036] As used herein, “complementary” in reference to an oligonucleotide means that at least 70% of the nucleobases of the oligonucleotide or one or more regions thereof and the nucleobases of another nucleic acid or one or more regions thereof are capable of hydrogen bonding with one another when the nucleobase sequence of the oligonucleotide and the other nucleic acid are aligned in opposing directions. Complementary nucleobases means nucleobases that are capable of forming hydrogen bonds with one another. Complementary nucleobase pairs include adenine (A) and thymine (T), adenine (A) and uracil (U), cytosine (C) and guanine (G), 5-methyl cytosine (mC) and guanine (G). Certain modified nucleobases that pair with natural nucleobases or with other modified nucleobases are known in the art. For example, inosine can pair with adenosine, cytosine, or uracil. Complementary oligonucleotides and/or nucleic acids need not have nucleobase complementarity at each nucleoside. Rather, some mismatches are tolerated. As used herein, “fully complementary” or “100% complementary” in reference to oligonucleotides means that oligonucleotides are complementary to another oligonucleotide or nucleic acid at each nucleoside of the oligonucleotide.

[0037] As used herein, “conjugate group” means a group of atoms that is directly attached to an oligonucleotide. Conjugate groups include a conjugate moiety and a conjugate linker that attaches the conjugate moiety to the oligonucleotide.

[0038] As used herein, “conjugate linker” means a single bond or a group of atoms comprising at least one bond that connects a conjugate moiety to an oligonucleotide.

[0039] As used herein, “conjugate moiety” means a group of atoms that modifies one or more properties of a molecule compared to the identical molecule lacking the conjugate moiety, including but not limited to pharmacodynamics, pharmacokinetics, stability, binding, absorption, tissue distribution, cellular distribution, cellular uptake, charge and clearance.

[0040] As used herein, “contiguous” in the context of an oligonucleotide refers to nucleosides, nucleobases, sugar moieties, or internucleoside linkages that are immediately adjacent to each other. For example, “contiguous nucleobases” means nucleobases that are immediately adjacent to each other in a sequence.

[0041] As used herein, “constrained ethyl” or “cEt” or “cEt modified sugar moiety” means a β-D ribosyl bicyclic sugar moiety wherein the second ring of the bicyclic sugar is formed via a bridge connecting the 4′-carbon and the 2′-carbon of the β-D ribosyl sugar moiety, wherein the bridge has the formula 4′-CH(CH₃)—O-2′, and wherein the methyl group of the bridge is in the S configuration.

[0042] As used herein, “cEt nucleoside” means a nucleoside comprising a cEt modified sugar moiety.

[0043] As used herein, “chirally enriched population” means a plurality of molecules of identical molecular formula, wherein the number or percentage of molecules within the population that contain a particular stereochemical configuration at a particular chiral center is greater than the number or percentage of molecules expected to contain the same particular stereochemical configuration at the same particular chiral center within the population if the particular chiral center were stereorandom. Chirally enriched populations of molecules having multiple chiral centers within each molecule may contain one or more stereorandom chiral centers. In certain embodiments, the molecules are modified oligonucleotides. In certain embodiments, the molecules are oligomeric compounds comprising modified oligonucleotides.

[0044] As used herein, “daily activities” mean one or more activities selected from dressing, eating, walking, bathing, cooking, shopping, cleaning and exercising.

[0045] As used herein, “dementia” means any combination of symptoms selected from memory loss, difficulty communicating, disorientation, difficulty reasoning, difficulty planning, discoordination, compromised motor function, confusion, disorientation, depression, anxiety, paranoia, agitation, and hallucination.

[0046] As used herein, “double-stranded” means a duplex formed by complementary strands of nucleic acids (including, but not limited to oligonucleotides) hybridized to one another. In certain embodiments, the two strands of a double-stranded region are separate molecules. In certain embodiments, the two strands are regions of the same molecule that has folded onto itself (e.g., a hairpin structure).

[0047] As used herein, “duplex” or “duplex region” means the structure formed by two oligonucleotides or portions thereof that are hybridized to one another.

[0048] As used herein, “gapmer” means a modified oligonucleotide comprising an internal region positioned between external regions having one or more nucleosides, wherein the nucleosides comprising the internal region are chemically distinct from the nucleoside or nucleosides comprising the external regions, and wherein the modified oligonucleotide supports RNase H cleavage. The internal region may be referred to as the “gap” and the external regions may be referred to as the “wings” or “wing segments.” In certain embodiments, the internal region is a deoxy region. The positions of the internal region or gap refer to the order of the nucleosides of the internal region and are counted starting from the 5′-end of the internal region. Unless otherwise indicated, “gapmer” refers to a sugar motif. In certain embodiments, each nucleoside of the gap is a 2′-β-D-deoxynucleoside. In certain embodiments, the gap comprises one 2′-substituted nucleoside at position 1, 2, 3, 4, or 5 of the gap, and the remainder of the nucleosides of the gap are 2′-β-D-deoxynucleosides. As used herein, the term “MOE gapmer” indicates a gapmer having a gap comprising 2′-β-D-deoxynucleosides and wings comprising 2′-MOE modified nucleosides. As used herein, the term “mixed wing gapmer” indicates a gapmer having wings comprising modified nucleosides comprising at least two different sugar modifications. Unless otherwise indicated, a gapmer may comprise one or more modified internucleoside linkages and/or modified nucleobases and such modifications do not necessarily follow the gapmer pattern of the sugar modifications.

[0049] As used herein, “hotspot region” is a range of nucleobases on a target nucleic acid that is amenable to oligomeric compound-mediated reduction of the amount or activity of the target nucleic acid.

[0050] As used herein, “hybridization” means the annealing of oligonucleotides and/or nucleic acids. While not limited to a particular mechanism, the most common mechanism of hybridization involves hydrogen bonding, which may be Watson-Crick, Hoogsteen or reversed Hoogsteen hydrogen bonding, between complementary nucleobases. In certain embodiments, complementary nucleic acid molecules include, but are not limited to, an antisense compound and a nucleic acid target. In certain embodiments, complementary nucleic acid molecules include, but are not limited to, an oligonucleotide and a nucleic acid target.

[0051] As used herein, “internucleoside linkage” is the covalent linkage between adjacent nucleosides in an oligonucleotide. As used herein “modified internucleoside linkage” means any internucleoside linkage other than a phosphodiester internucleoside linkage. “Phosphorothioate internucleoside linkage” is a modified internucleoside linkage in which one of the non-bridging oxygen atoms of a phosphodiester internucleoside linkage is replaced with a sulfur atom.

[0052] As used herein, “inverted nucleoside” means a nucleotide having a 3′ to 3′ and/or 5′ to 5′ internucleoside linkage, as shown herein.

[0053] As used herein, “inverted sugar moiety” means the sugar moiety of an inverted nucleoside or an abasic sugar moiety having a 3′ to 3′ and/or 5′ to 5′ internucleoside linkage.

[0054] As used herein, “linker-nucleoside” means a nucleoside that links, either directly or indirectly, an oligonucleotide to a conjugate moiety. Linker-nucleosides are located within the conjugate linker of an oligomeric compound. Linker-nucleosides are not considered part of the oligonucleotide portion of an oligomeric compound even if they are contiguous with the oligonucleotide.

[0055] “Lipid nanoparticle” or “LNP” is a vesicle comprising a lipid layer encapsulating a pharmaceutically active molecule, such as a nucleic acid molecule, e.g., an RNAi or a plasmid from which an RNAi is transcribed. LNPs are described in, for example, U.S. Pat. Nos. 6,858,225, 6,815,432, 8,158,601, and 8,058,069, the entire contents of which are hereby incorporated herein by reference.

[0056] As used herein, “non-bicyclic modified sugar moiety” means a modified sugar moiety that comprises a modification, such as a substituent, that does not form a bridge between two atoms of the sugar to form a second ring.

[0057] As used herein, “neuroinflammation” means inflammation of the peripheral nervous system or the central nervous system. In certain embodiments, the amount of a cytokine in the cerebrospinal fluid of a subject with neuroinflammation is significantly greater than the amount of the cytokine in the cerebrospinal fluid of a subject that does not have neuroinflammation. In certain embodiments, a subject with neuroinflammation has Alzheimer's Disease. In certain embodiments, a subject that does not have neuroinflammation does not have Alzheimer's Disease.

[0058] As used herein, “mismatch” or “non-complementary” means a nucleobase of a first nucleic acid sequence that is not complementary with the corresponding nucleobase of a second nucleic acid sequence or target nucleic acid when the first and second nucleic acid sequences are aligned.

[0059] As used herein, “MOE” means O-methoxyethyl. “2′-MOE” or “2′-MOE modified sugar” or “2′-MOE modified sugar moiety” means a 2′-OCH₂CH₂OCH₃ group (or a 2′-O(CH₂)₂—OCH₃ group) in place of the 2′-OH group of a ribosyl sugar moiety. Unless otherwise indicated, a 2′-MOE modified sugar moiety is in the β-D-ribosyl configuration. As used herein, “2′-MOE modified nucleoside” means a nucleoside comprising a 2′-MOE modified sugar moiety (or a 2′-O(CH₂)₂—OCH₃ ribosyl modified sugar moiety).

[0060] As used herein, “2′-OMe” means a 2′-OCH₃ group in place of the 2′-OH group of a ribosyl sugar moiety. A “2′-O-methyl sugar moiety” or “2′-OMe sugar moiety” or “2′-OMe modified sugar moiety” or “2′-O methylribosyl sugar” means a sugar moiety with a 2′-OCH₃ group in place of the 2′-OH group of a ribosyl sugar moiety. Unless otherwise indicated, a 2′-OMe sugar moiety is in the β-D-ribosyl configuration.

[0061] As used herein, “2′-OMe nucleoside” means a nucleoside comprising a 2′-OMe modified sugar moiety.

[0062] As used herein, “2′-F” means a 2′-fluoro group in place of the 2′-OH group of a ribosyl sugar moiety. A “2′-F sugar moiety” or “2′-F modified sugar moiety” or “2′-fluororibosyl sugar” means a sugar moiety with a 2′-F group in place of the 2′-OH group of a ribosyl sugar moiety. Unless otherwise indicated, a 2′-F sugar moiety is in the β-D-ribosyl configuration.

[0063] As used herein, “2′-F nucleoside” or “2′-F modified nucleoside” means a nucleoside comprising a 2′-F modified sugar moiety.

[0064] As used herein, “motif” means the pattern of unmodified and/or modified sugar moieties, nucleobases, and/or internucleoside linkages, in an oligonucleotide.

[0065] As used herein, “neurodegenerative disease” means a condition marked by progressive loss of function or structure, including loss of neuronal function and death of neurons. In certain embodiments, the neurodegenerative disease is Alzheimer's Disease. In certain embodiments, the neurodegenerative disease is Alzheimer's Disease in Down Syndrome patients. In certain embodiments, the neurodegenerative disease is Cerebral Amyloid Angiopathy.

[0066] As used herein, “nucleobase” means an unmodified nucleobase or a modified nucleobase. A nucleobase is a heterocyclic moiety. As used herein an “unmodified nucleobase” is adenine (A), thymine (T), cytosine (C), uracil (U), or guanine (G). As used herein, a “modified nucleobase” is a group of atoms other than unmodified A, T, C, U, or G capable of pairing with at least one other nucleobase. A “5-methyl cytosine” is a modified nucleobase. A universal base is a modified nucleobase that can pair with any one of the five unmodified nucleobases.

[0067] As used herein, “nucleobase sequence” means the order of contiguous nucleobases in a nucleic acid or oligonucleotide independent of any sugar or internucleoside linkage modification.

[0068] As used herein, “nucleoside” means a compound or fragment of a compound comprising a nucleobase and a sugar moiety. The nucleobase and sugar moiety are each, independently, unmodified or modified.

[0069] As used herein, “nucleoside overhang” refers to unpaired nucleotides at either or both ends of a duplex formed by hybridization of an antisense RNAi oligonucleotide and a sense RNAi oligonucleotide.

[0070] As used herein, “modified nucleoside” means a nucleoside comprising a modified nucleobase and/or a modified sugar moiety.

[0071] As used herein, “linked nucleosides” are nucleosides that are connected in a contiguous sequence (i.e., no additional nucleosides are presented between those that are linked).

[0072] As used herein, “modified oligonucleotide” means an oligonucleotide, wherein at least one nucleoside or internucleoside linkage is modified. As used herein, “unmodified oligonucleotide” means an oligonucleotide that does not comprise any nucleoside modifications or internucleoside modifications. Thus, each nucleoside of an unmodified oligonucleotide is a DNA or RNA nucleoside and each internucleoside linkage is a phosphodiester linkage.

[0073] As used herein, “neurofibrillary tangles” mean hyperphosphorylated insoluble aggregates of tau protein. Tau protein is encoded by a human MAPT gene.

[0074] As used herein, “oligomeric compound” means an oligonucleotide and optionally one or more additional features, such as a conjugate group or terminal group. An oligomeric compound may be paired with a second oligomeric compound that is complementary to the first oligomeric compound or may be unpaired. A “singled-stranded oligomeric compound” is an unpaired oligomeric compound. The term “oligomeric duplex” means a duplex formed by two oligomeric compounds having complementary nucleobase sequences. Each oligomeric compound of an oligomeric duplex may be referred to as a “duplexed oligomeric compound.”

[0075] As used herein, “oligonucleotide” means a polymer of linked nucleosides connected via internucleoside linkages, wherein each nucleoside and internucleoside linkage may be modified or unmodified. Unless otherwise indicated, oligonucleotides consist of 8-50 linked nucleosides. An oligonucleotide may be paired with a second oligonucleotide that is complementary to the oligonucleotide or it may be unpaired. A “single-stranded oligonucleotide” is an unpaired oligonucleotide. A “double-stranded oligonucleotide” is an oligonucleotide that is paired with a second oligonucleotide. An “oligonucleotide duplex” means a duplex formed by two paired oligonucleotides having complementary nucleobase sequences. Each oligo of an oligonucleotide duplex is a “duplexed oligonucleotide” or a “double-stranded oligonucleotide.”

[0076] As used herein, “pharmaceutically acceptable carrier or diluent” means any substance suitable for use in administering to an animal. Certain such carriers enable pharmaceutical compositions to be formulated as, for example, tablets, pills, dragees, capsules, liquids, gels, syrups, slurries, suspension and lozenges for the oral ingestion by a subject. In certain embodiments, a pharmaceutically acceptable carrier or diluent is sterile water, sterile saline, sterile buffer solution or sterile artificial cerebrospinal fluid.

[0077] As used herein “pharmaceutically acceptable salts” means physiologically and pharmaceutically acceptable salts of compounds. Pharmaceutically acceptable salts retain the desired biological activity of the parent compound and do not impart undesired toxicological effects thereto.

[0078] As used herein “pharmaceutical composition” means a mixture of substances suitable for administering to a subject. For example, a pharmaceutical composition may comprise an oligomeric compound and a sterile aqueous solution. In certain embodiments, a pharmaceutical composition shows activity in free uptake assay in certain cell lines.

[0079] As used herein “prodrug” means a therapeutic agent in a first form outside the body that is converted to a second form within an animal or cells thereof. Typically, conversion of a prodrug within the animal is facilitated by the action of an enzymes (e.g., endogenous or viral enzyme) or chemicals present in cells or tissues and/or by physiologic conditions. In certain embodiments, the first form of the prodrug is less active than the second form.

[0080] As used herein, “progressive memory loss” means occurrences of forgetfulness (e.g., inability to remember events, names, and facts) that increase in frequency over time.

[0081] As used herein, “reducing or inhibiting the amount or activity” refers to a reduction or blockade of the transcriptional expression or activity relative to the transcriptional expression or activity in an untreated or control sample and does not necessarily indicate a total elimination of transcriptional expression or activity.

[0082] As used herein, “RNAi agent” means an antisense compound that acts, at least in part, through RISC or Ago2 to modulate a target nucleic acid and/or protein encoded by a target nucleic acid. RNAi agents include, but are not limited to double-stranded siRNA, single-stranded RNA (ssRNA), and microRNA, including microRNA mimics. RNAi agents may comprise conjugate groups and/or terminal groups. In certain embodiments, an RNAi agent modulates the amount and/or activity of a target nucleic acid. The term RNAi agent excludes antisense compounds that act through RNase H.

[0083] As used herein, “RNAi oligonucleotide” means an antisense RNAi oligonucleotide or a sense RNAi oligonucleotide.

[0084] As used herein, “antisense RNAi oligonucleotide” means an oligonucleotide comprising a region that is complementary to a target sequence, and which includes at least one chemical modification suitable for RNAi.

[0085] As used herein, “sense RNAi oligonucleotide” means an oligonucleotide comprising a region that is complementary to a region of an antisense RNAi oligonucleotide, and which is capable of forming a duplex with such antisense RNAi oligonucleotide. A duplex formed by an antisense RNAi oligonucleotide and a sense RNAi oligonucleotide is referred to as a double-stranded RNAi agent (dsRNAi) or a short interfering RNA (siRNA).

[0086] As used herein, “RNase H compound” means an antisense compound that acts, at least in part, through RNase H to modulate a target nucleic acid and/or protein encoded by a target nucleic acid. In certain embodiments, RNase H compounds are single-stranded. In certain embodiments, RNase H compounds are double-stranded. RNase H compounds may comprise conjugate groups and/or terminal groups. In certain embodiments, an RNase H compound modulates the amount or activity of a target nucleic acid. The term RNase H compound excludes antisense compounds that act principally through RISC/Ago2.

[0087] As used herein, “antisense RNase H oligonucleotide” means an oligonucleotide comprising a region that is complementary to a target sequence, and which includes at least one chemical modification suitable for RNase H-mediated nucleic acid reduction.

[0088] As used herein, “self-complementary” in reference to an oligonucleotide means an oligonucleotide that at least partially hybridizes to itself.

[0089] As used herein, “single-stranded” means a nucleic acid (including but not limited to an oligonucleotide) that is unpaired and is not part of a duplex. Single-stranded compounds are capable of hybridizing with complementary nucleic acids to form duplexes, at which point they are no longer single-stranded.

[0090] As used herein, “stabilized phosphate group” means a 5′-phosphate analog that is metabolically more stable than a 5′-phosphate as naturally occurs on DNA or RNA.

[0091] As used herein, “standard in vitro assay,” with respect to means the assay described in Example 1 or Example 10 and reasonable variations thereof.

[0092] As used herein, “stereorandom chiral center” in the context of a population of molecules of identical molecular formula means a chiral center having a random stereochemical configuration. For example, in a population of molecules comprising a stereorandom chiral center, the number of molecules having the (S) configuration of the stereorandom chiral center may be but is not necessarily the same as the number of molecules having the (R) configuration of the stereorandom chiral center. The stereochemical configuration of a chiral center is considered random when it is the result of a synthetic method that is not designed to control the stereochemical configuration. In certain embodiments, a stereorandom chiral center is a stereorandom phosphorothioate internucleoside linkage.

[0093] As used herein, “sugar moiety” means an unmodified sugar moiety or a modified sugar moiety. As used herein, “unmodified sugar moiety” means a 2′-OH(H) ribosyl moiety, as found in RNA (an “unmodified RNA sugar moiety”), or a 2′-H(H) deoxyribosyl sugar moiety, as found in DNA (an “unmodified DNA sugar moiety”). Unmodified sugar moieties have one hydrogen at each of the 1′, 3′, and 4′ positions, an oxygen at the 3′ position, and two hydrogens at the 5′ position. As used herein, “modified sugar moiety” or “modified sugar” means a modified furanosyl sugar moiety or a sugar surrogate.

[0094] As used herein, “sugar surrogate” means a modified sugar moiety having other than a furanosyl moiety that can link a nucleobase to another group, such as an internucleoside linkage, conjugate group, or terminal group in an oligonucleotide. Modified nucleosides comprising sugar surrogates can be incorporated into one or more positions within an oligonucleotide and such oligonucleotides are capable of hybridizing to complementary oligomeric compounds or target nucleic acids.

[0095] As used herein, “symptom or hallmark” means any physical feature or test result that indicates the existence or extent of a disease or disorder. In certain embodiments, a symptom is apparent to a subject or to a medical professional examining or testing said subject. In certain embodiments, a hallmark is apparent upon invasive diagnostic testing, including, but not limited to, post-mortem tests.

[0096] As used herein, “target nucleic acid” and “target RNA” mean a nucleic acid that an antisense compound is designed to affect. Target RNA means an RNA transcript and includes pre-mRNA and mRNA unless otherwise specified.

[0097] As used herein, “target region” means a portion of a target nucleic acid to which an oligomeric compound is designed to hybridize.

[0098] As used herein, “terminal group” means a chemical group or group of atoms that is covalently linked to a terminus of an oligonucleotide.

[0099] As used herein, “treating” means improving a subject's disease or condition by administering an oligomeric agent or oligomeric compound described herein. In certain embodiments, treating a subject improves a symptom relative to the same symptom in the absence of the treatment. In certain embodiments, treatment reduces in the severity or frequency of a symptom, or delays the onset of a symptom, slows the progression of a symptom, or slows the severity or frequency of a symptom.

[0100] As used herein, “therapeutically effective amount” means an amount of a pharmaceutical agent or composition that provides a therapeutic benefit to an animal. For example, a therapeutically effective amount improves a symptom of a disease.

### Certain Embodiments

[0101] The present disclosure provides the following non-limiting numbered embodiments:

[0102] Embodiment 1. An oligomeric compound comprising a modified oligonucleotide consisting of 12 to 30 linked nucleosides wherein the nucleobase sequence of the modified oligonucleotide is at least 80% complementary to an equal length portion of an APOE RNA, and wherein the modified oligonucleotide comprises at least one modification selected from a modified sugar and a modified internucleoside linkage.

[0103] Embodiment 2. An oligomeric compound comprising a modified oligonucleotide consisting of 12 to 30 linked nucleosides, wherein the nucleobase sequence of the modified oligonucleotide comprises at least 12, at least 13, at least 14, at least 15, at least 16, at least 17, at least 18, at least 19, or at least 20 nucleobases of any of SEQ ID NOS: 20-2551 or 2934; wherein the modified oligonucleotide comprises at least one modification selected from a modified sugar and a modified internucleoside linkage.

[0104] Embodiment 3. An oligomeric compound comprising a modified oligonucleotide consisting of 12 to 30 linked nucleosides, wherein the nucleobase sequence of the modified oligonucleotide comprises at least 12, at least 13, at least 14, at least 15, at least 16, at least 17, at least 18, at least 19, at least 20, at least 21, at least 22, or at least 23 nucleobases of any of SEQ ID NOS: 2552-2742 or 2935-2944; wherein the modified oligonucleotide comprises at least one modification selected from a modified sugar and a modified internucleoside linkage.

[0105] Embodiment 4. An oligomeric compound comprising a modified oligonucleotide consisting of 12 to 30 linked nucleosides wherein the nucleobase sequence of the modified oligonucleotide is complementary to at least 8, at least 9, at least 10, at least 11, at least 12, at least 13, at least 14, at least 15, at least 16, at least 17, at least 18, at least 19, at least 20, or at least 21 contiguous nucleobases of:
[0106] an equal length portion of nucleobases 1155-1178 of SEQ ID NO: 2;
[0107] an equal length portion of nucleobases 1207-1230 of SEQ ID NO: 2; or
[0108] an equal length portion of nucleobases 1259-1295 of SEQ ID NO: 2;
[0109] wherein the modified oligonucleotide comprises at least one modification selected from a modified sugar and a modified internucleoside linkage.

[0110] Embodiment 5. An oligomeric compound comprising a modified oligonucleotide consisting of 12 to 30 linked nucleosides wherein the nucleobase sequence of the modified oligonucleotide is complementary to at least 8, at least 9, at least 10, at least 11, at least 12, at least 13, at least 14, at least 15, at least 16, at least 17, at least 18, at least 19, at least 20, or at least 21 contiguous nucleobases of:
[0111] an equal length portion of nucleobases 1135-1166 of SEQ ID NO: 2; or
[0112] an equal length portion of nucleobases 1255-1294 of SEQ ID NO: 2;
[0113] wherein the modified oligonucleotide comprises at least one modification selected from a modified sugar and a modified internucleoside linkage.

[0114] Embodiment 6. An oligomeric compound comprising a modified oligonucleotide consisting of 12 to 30 linked nucleosides wherein the nucleobase sequence of the modified oligonucleotide is complementary to at least 8, at least 9, at least 10, at least 11, at least 12, at least 13, at least 14, at least 15, at least 16, at least 17, at least 18, at least 19, at least 20, or at least 21 contiguous nucleobases of an equal length portion of nucleobases 1255-1295 of SEQ ID NO: 2, wherein the modified oligonucleotide comprises at least one modification selected from a modified sugar and a modified internucleoside linkage.

[0115] Embodiment 7. An oligomeric compound comprising a modified oligonucleotide consisting of 12 to 30 linked nucleosides and having a nucleobase sequence comprising at least 8, at least 9, at least 10, at least 11, at least 12, at least 13, at least 14, at least 15, at least 16, at least 17, at least 18, at least 19, at least 20, at least 21, at least 22 or at least 23 contiguous nucleobases of any of the nucleobase sequences of:
[0116] SEQ ID NOS: 70, 71, 169, 170, 447, 448, 543, 552, 553, 919, 1061, 1132, 1938, 1991, 2066, 2154, 2226, 2259, 2324, 2417, or 2486;
[0117] SEQ ID NOS: 460, 461, 462, 563, 564, 565, 566, 990, 1469, 1572, 1653, 1746, 1914, 1955, 2026, 2110, 2211, 2247, 2344, 2393, or 2481; or
[0118] SEQ ID NOS: 77, 475, 476, 477, 478, 479, 480, 481, 482, 483, 578, 579, 580, 581, 582, 622, 623, 624, 625, 626, 627, 1063, 1193, 1231, 1232, 1300, 1305, 1378, 1409, 1493, 1526, 1564, 1576, 1678, 1679, 1695, 1827, 1870, 1921, 1928, 1950, 1982, 2012, 2046, 2051, 2074, 2088, 2118, 2158, 2169, 2208, 2223, 2232, 2255, 2321, 2343, 2380, 2436, 2449, or 2451.

[0119] Embodiment 8. An oligomeric compound comprising a modified oligonucleotide consisting of 12 to 30 linked nucleosides and having a nucleobase sequence comprising at least 8, at least 9, at least 10, at least 11, at least 12, at least 13, at least 14, at least 15, at least 16, at least 17, at least 18, at least 19, at least 20, at least 21, at least 22 or at least 23 contiguous nucleobases of any of the nucleobase sequences of:
[0120] SEQ ID NOS: 2600, 2601, 2604, 2605, 2606, 2607, 2608, 2609, 2610, or 2613; or
[0121] SEQ ID NOS: 2720, 2721, 2722, 2726, 2727, 2729, 2730, 2731, 2732, 2733, 2734, 2735, 2736, 2737, 2738, or 2740.

[0122] Embodiment 9. An oligomeric compound comprising a modified oligonucleotide consisting of 12 to 30 linked nucleosides and having a nucleobase sequence comprising at least 8, at least 9, at least 10, at least 11, at least 12, at least 13, at least 14, at least 15, at least 16, at least 17, at least 18, at least 19, at least 20, at least 21, at least 22 or at least 23 contiguous nucleobases of any of the nucleobase sequences of SEQ ID NOs: 76, 77, 473, 474, 475, 476, 477, 478, 479, 480, 481, 482, 483, 576, 578, 579, 580, 581, 582, 622, 623, 624, 625, 626, 627, 1063, 1193, 1231, 1232, 1300, 1305, 1378, 1409, 1493, 1526, 1564, 1576, 1678, 1679, 1695, 1701, 1792, 1827, 1870, 1886, 1906, 1921, 1928, 1950, 1982, 2012, 2046, 2051, 2074, 2088, 2118, 2158, 2169, 2208, 2223, 2232, 2255, 2321, 2343, 2370, 2380, 2436, 2449, 2490, 2451, 2720, 2721, 2722, 2725, 2726, 2727, 2729, 2730, 2731, 2732, 2733, 2734, 2735, 2736, 2737, 2738, 2740, 2935 or 2936.

[0123] Embodiment 10. The oligomeric compound of any of embodiments 1-9, wherein the nucleobase sequence of the modified oligonucleotide is at least 80%, 85%, 90%, 95%, or 100% complementary to any of the nucleobase sequences of SEQ ID NOs: 1-6 when measured across the entire nucleobase sequence of the modified oligonucleotide.

[0124] Embodiment 11. The oligomeric compound of any of embodiments 1-10, wherein at least one nucleoside of the modified oligonucleotide is a modified nucleoside.

[0125] Embodiment 12. The oligomeric compound of embodiment 11, wherein at least one modified nucleoside of the modified oligonucleotide comprises a modified sugar moiety.

[0126] Embodiment 13. The oligomeric compound of embodiment 12, wherein the modified sugar moiety comprises a bicyclic sugar moiety.

[0127] Embodiment 14. The oligomeric compound of embodiment 13, wherein the bicyclic sugar moiety comprises a 2′-4′ bridge selected from —O—CH₂— and —O—CH(CH₃)—.

[0128] Embodiment 15. The oligomeric compound of any of embodiments 11-14, wherein at least one modified nucleoside of the modified oligonucleotide comprises a non-bicyclic modified sugar moiety.

[0129] Embodiment 16. The oligomeric compound of embodiment 15, wherein at least one modified nucleoside of the modified oligonucleotide comprises a bicyclic sugar moiety having a 2′-4′ bridge and at least one nucleoside comprising a non-bicyclic modified sugar moiety.

[0130] Embodiment 17. The oligomeric compound of embodiment 15 or 16, wherein the non-bicyclic modified sugar moiety is a 2′-O(CH₂)₂—OCH₃ ribosyl modified sugar moiety, a 2′-OMe modified sugar moiety, or a 2′-F modified sugar moiety.

[0131] Embodiment 18. The oligomeric compound of any of embodiments 1-17, wherein the modified oligonucleotide comprises at least one modified nucleoside comprising a sugar surrogate.

[0132] Embodiment 19. The oligomeric compound of embodiment 18, wherein at least one modified nucleoside of the modified oligonucleotide comprises a sugar surrogate selected from morpholino and PNA.

[0133] Embodiment 20. The oligomeric compound of any of embodiments 1-19, wherein the modified oligonucleotide comprises at least one modified internucleoside linkage.

[0134] Embodiment 21. The oligomeric compound of embodiment 20, wherein each internucleoside linkage of the modified oligonucleotide is a modified internucleoside linkage.

[0135] Embodiment 22. The oligomeric compound of embodiment 20 or 21, wherein at least one internucleoside linkage is a phosphorothioate internucleoside linkage.

[0136] Embodiment 23. The oligomeric compound of embodiment 20 or 22, wherein the modified oligonucleotide comprises at least one phosphodiester internucleoside linkage.

[0137] Embodiment 24. The oligomeric compound of any of embodiments 20, 22, or 23, wherein each internucleoside linkage is independently selected from a phosphodiester internucleoside linkage or a phosphorothioate internucleoside linkage.

[0138] Embodiment 25. The oligomeric compound of any of embodiments 20 or 22-24, wherein at least 4, at least 5, at least 6, at least 7, at least 8, at least 9, at least 10, at least 11, at least 12, at least 13, at least 14, at least 15, at least 16, at least 17, at least 18, or at least 19 internucleoside linkages of the modified oligonucleotide are phosphorothioate internucleoside linkages.

[0139] Embodiment 26. The oligomeric compound of any of embodiments 20-25, wherein each internucleoside linkage is a phosphorothioate internucleoside linkage.

[0140] Embodiment 27. The oligomeric compound of any of embodiments 20 or 22-26, wherein the internucleoside linkage motif of the modified oligonucleotide is selected from: 5′-sssssssssssssssssss-3′, 5′-soossssssssssooss-3′, 5′-sooosssssssssssooss-3′, 5′-soossssssssssos-3′, 5′-ssoooooooooooooooooss-3′, 5′-ssooooooooooooooooss-3′, 5′-soooossssssssssooss-3′, 5′-sossssssssssssssoss-3′, 5′-soosssssssssooss-3′, and 5′-sooooossssssssssoss-3′; wherein each ‘o’ represents a phosphodiester internucleoside linkage and each ‘s’ represents a phosphorothioate internucleoside linkage.

[0141] Embodiment 28. The oligomeric compound of any of embodiments 1-27, wherein the modified oligonucleotide comprises a modified nucleobase.

[0142] Embodiment 29. The oligomeric compound of embodiment 28, wherein the modified nucleobase is a 5-methyl cytosine.

[0143] Embodiment 30. The oligomeric compound of any of embodiments 1-29, wherein the oligomeric compound comprises a modified oligonucleotide consisting of 12-22, 12-20, 14-18, 14-20, 15-17, 15-25, 16-20, 16-18, 18-22, 18-25, 18-20, 20-25, or 21-23 linked nucleosides, or a pharmaceutically acceptable salt thereof.

[0144] Embodiment 31. The oligomeric compound of embodiment 30, which is a pharmaceutically acceptable salt comprising one or more cations selected from sodium, potassium, calcium, and magnesium.

[0145] Embodiment 32. The oligomeric compound of any of embodiments 1-31, wherein the modified oligonucleotide consists of 16 or 18 linked nucleosides.

[0146] Embodiment 33. The oligomeric compound of any of embodiments 1-31, wherein the modified oligonucleotide consists of 20 linked nucleosides.

[0147] Embodiment 34. The oligomeric compound of any of embodiments 1-31, wherein the modified oligonucleotide consists of 21 linked nucleosides.

[0148] Embodiment 35. The oligomeric compound of any of embodiments 1-31, wherein the modified oligonucleotide consists of 23 linked nucleosides.

[0149] Embodiment 36. The oligomeric compound of any of embodiments 1-35, wherein the oligomeric compound is an RNase H compound.

[0150] Embodiment 37. The oligomeric compound of embodiment 36, wherein the modified oligonucleotide is a gapmer.

[0151] Embodiment 38. The oligomeric compound of any of embodiments 1-37, wherein the modified oligonucleotide has a sugar motif comprising:
[0152] a 5′-region consisting of 1-6 linked 5′-region nucleosides;
[0153] a central region consisting of 6-10 linked central region nucleosides; and
[0154] a 3′-region consisting of 1-6 linked 3′-region nucleosides;
[0155] wherein the 3′-most nucleoside of the 5′-region and the 5′-most nucleoside of the 3′-region comprise modified sugar moieties, and
[0156] each of the central region nucleosides is selected from a nucleoside comprising a 2′-β-D-deoxyribosyl sugar moiety and a nucleoside comprising a 2′-substituted sugar moiety, wherein the central region comprises at least six nucleosides comprising a 2′-β-D-deoxyribosyl sugar moiety and no more than two nucleosides comprising a 2′-substituted sugar moiety.

[0157] Embodiment 39. The oligomeric compound of any of embodiments 1-34 or 36-37, wherein the modified oligonucleotide has a sugar motif comprising:
[0158] a 5′-region consisting of 1-6 linked 5′-region nucleosides;
[0159] a central region consisting of 6-10 linked central region nucleosides; and
[0160] a 3′-region consisting of 1-6 linked 3′-region nucleosides; wherein
[0161] each of the 5′-region nucleosides and each of the 3′-region nucleosides comprises a modified sugar moiety and each of the central region nucleosides comprises a 2′-β-D-deoxyribosyl sugar moiety.

[0162] Embodiment 40. The oligomeric compound of embodiment 39, wherein the modified oligonucleotide has a sugar motif comprising:
[0163] a 5′-region consisting of 5 linked 5′-region nucleosides;
[0164] a central region consisting of 10 linked central region nucleosides; and
[0165] a 3′-region consisting of 5 linked 3′-region nucleosides; wherein
[0166] each of the 5′-region nucleosides and each of the 3′-region nucleosides comprises either a cEt modified sugar moiety or a 2′-O(CH₂)₂—OCH₃ ribosyl modified sugar moiety, and each of the central region nucleosides comprises a 2′-β-D-deoxyribosyl sugar moiety.

[0167] Embodiment 41. The oligomeric compound of embodiment 39 or embodiment 40, wherein the modified oligonucleotide has a sugar motif comprising:
[0168] a 5′-region consisting of 5 linked 5′-region nucleosides;
[0169] a central region consisting of 10 linked central region nucleosides; and
[0170] a 3′-region consisting of 5 linked 3′-region nucleosides; wherein
[0171] each of the 5′-region nucleosides and each of the 3′-region nucleosides comprises a 2′-O(CH₂)₂—OCH₃ ribosyl modified sugar moiety, and each of the central region nucleosides comprises a 2′-β-D-deoxyribosyl sugar moiety.

[0172] Embodiment 42. The oligomeric compound of any of embodiments 1-35, wherein the oligomeric compound is an RNAi agent.

[0173] Embodiment 43. The oligomeric compound of any of embodiments 1-42, wherein the oligomeric compound comprises an antisense RNAi oligonucleotide comprising a targeting region comprising at least 15 contiguous nucleobases, wherein the targeting region is at least 90% complementary to an equal-length portion of an APOE RNA.

[0174] Embodiment 44. The oligomeric compound of embodiment 43, wherein the targeting region of the antisense RNAi oligonucleotide is at least 95% complementary or is 100% complementary to the equal length portion of an APOE RNA.

[0175] Embodiment 45. The oligomeric compound of any of embodiments 43-44, wherein the targeting region of the antisense RNAi oligonucleotide comprises at least 19, 20, 21, or 25 contiguous nucleobases.

[0176] Embodiment 46. The oligomeric compound of any of embodiments 43-45, wherein the APOE RNA has the nucleobase sequence of any of SEQ ID NOs: 1-6.

[0177] Embodiment 47. The oligomeric compound of any of embodiments 43-46, wherein at least one nucleoside of the antisense RNAi oligonucleotide comprises a modified sugar moiety selected from: 2′-F, 2′-OMe, 2′-O(CH₂)₂—OCH₃, 2′-NMA, LNA, and cEt; or a sugar surrogate selected from GNA, and UNA.

[0178] Embodiment 48. The oligomeric compound of any of embodiments 43-47, wherein each nucleoside of the antisense RNAi oligonucleotide comprises a modified sugar moiety or a sugar surrogate.

[0179] Embodiment 49. The oligomeric compound of any of embodiments 43-48, wherein at least 80%, at least 90%, or 100% of the nucleosides of the antisense RNAi oligonucleotide comprises a modified sugar moiety selected from 2′-F and 2′-OMe.

[0180] Embodiment 50. The oligomeric compound of any of embodiments 43-49, comprising a stabilized phosphate group attached to the 5′ position of the 5′-most nucleoside of the antisense RNAi oligonucleotide.

[0181] Embodiment 51. The oligomeric compound of embodiment 50, wherein the stabilized phosphate group comprises a cyclopropyl phosphonate or an (E)-vinyl phosphonate.

[0182] Embodiment 52. The oligomeric compound of any of embodiments 1-51, wherein the oligomeric compound is a single-stranded oligomeric compound.

[0183] Embodiment 53. The oligomeric compound of any of embodiments 1-52, consisting of the modified oligonucleotide or the RNAi antisense oligonucleotide.

[0184] Embodiment 54. The oligomeric compound of any of embodiments 1-53, comprising a conjugate group comprising a conjugate moiety and a conjugate linker.

[0185] Embodiment 55. The oligomeric compound of embodiment 54, wherein the conjugate linker consists of a single bond.

[0186] Embodiment 56. The oligomeric compound of embodiment 54, wherein the conjugate linker is cleavable.

[0187] Embodiment 57. The oligomeric compound of embodiment 54, wherein the conjugate linker comprises 1-3 linker-nucleosides.

[0188] Embodiment 58. The oligomeric compound of any of embodiments 54-57, wherein the conjugate group is attached to the 5′-end of the modified oligonucleotide or the antisense RNAi oligonucleotide.

[0189] Embodiment 59. The oligomeric compound of any of embodiments 54-57, wherein the conjugate group is attached to the 3′-end of the modified oligonucleotide or the antisense RNAi oligonucleotide.

[0190] Embodiment 60. The oligomeric compound of any of embodiments 1-59, comprising a terminal group.

[0191] Embodiment 61. The oligomeric compound of any of embodiments 1-56 or 58-60, wherein the oligomeric compound does not comprise linker-nucleosides.

[0192] Embodiment 62. An oligomeric duplex, comprising a first oligomeric compound comprising an antisense RNAi oligonucleotide of any of embodiments 43-61 and a second oligomeric compound comprising a sense RNAi oligonucleotide consisting of 17 to 30 linked nucleosides, wherein the nucleobase sequence of the sense RNAi oligonucleotide comprises an antisense-hybridizing region comprising least 15 contiguous nucleobases wherein the antisense-hybridizing region is at least 90% complementary to an equal length portion of the antisense RNAi oligonucleotide.

[0193] Embodiment 63. The oligomeric duplex of embodiment 62, wherein the sense RNAi oligonucleotide consists of 18-25, 20-25, or 21-23 linked nucleosides.

[0194] Embodiment 64. The oligomeric duplex of embodiment 62, wherein the sense RNAi oligonucleotide consists of 21 or 23 linked nucleosides.

[0195] Embodiment 65. The oligomeric duplex of any of embodiments 62-64, wherein 1-4 3′-most nucleosides of the antisense or the sense RNAi oligonucleotide are overhanging nucleosides.

[0196] Embodiment 66. The oligomeric duplex of any of embodiments 62-65, wherein 1-4 5′-most nucleosides of the antisense or sense RNAi oligonucleotide are overhanging nucleosides.

[0197] Embodiment 67. The oligomeric duplex of any of embodiments 62-64, wherein the duplex is blunt ended at the 3′-end of the antisense RNAi oligonucleotide.

[0198] Embodiment 68. The oligomeric duplex of any of embodiments 62-64, wherein the duplex is blunt ended at the 5′-end of the antisense RNAi oligonucleotide.

[0199] Embodiment 69. The oligomeric duplex of any of embodiments 62-68, wherein at least one nucleoside of the sense RNAi oligonucleotide comprises a modified sugar moiety selected from: 2′-F, 2′-OMe, LNA, cEt, or a sugar surrogate selected from GNA, and UNA.

[0200] Embodiment 70. The oligomeric duplex of embodiment 69, wherein each nucleoside of the sense RNAi oligonucleotide comprises a modified sugar moiety or a sugar surrogate.

[0201] Embodiment 71. The oligomeric duplex of embodiment 70, wherein at least 80%, at least 90%, or 100% of the nucleosides of the sense RNAi oligonucleotide comprises a modified sugar moiety selected from 2′-F and 2′-OMe.

[0202] Embodiment 72. The oligomeric duplex of any of embodiments 62-71, wherein at least one nucleoside of the sense RNAi oligonucleotide comprises a modified nucleobase.

[0203] Embodiment 73. The oligomeric duplex of any of embodiments 62-72, wherein at least one internucleoside linkage of the sense RNAi oligonucleotide is a modified internucleoside linkage.

[0204] Embodiment 74. The oligomeric duplex of embodiment 73, wherein at least one internucleoside linkage of the sense RNAi oligonucleotide is a phosphorothioate internucleoside linkage.

[0205] Embodiment 75. The oligomeric duplex of any of embodiments 62-74, wherein the oligomeric duplex comprises 1-5 abasic sugar moieties attached to one or both ends of the antisense or sense RNA oligonucleotide.

[0206] Embodiment 76. The oligomeric duplex of any of embodiments 62-75, consisting of the antisense RNAi oligonucleotide and the sense RNAi oligonucleotide.

[0207] Embodiment 77. The oligomeric duplex of any of embodiments 62-75, wherein the second oligomeric compound comprises a conjugate group comprising a conjugate moiety and a conjugate linker.

[0208] Embodiment 78. The oligomeric duplex of embodiment 77, wherein the conjugate linker consists of a single bond.

[0209] Embodiment 79. The oligomeric duplex of embodiment 78, wherein the conjugate linker is cleavable.

[0210] Embodiment 80. The oligomeric duplex of embodiment 78, wherein the conjugate linker comprises 1-3 linker-nucleosides.

[0211] Embodiment 81. The oligomeric duplex of any of embodiments 78-80, wherein the conjugate group is attached to the 5′-end of the sense RNAi oligonucleotide.

[0212] Embodiment 82. The oligomeric duplex of any of embodiments 78-80, wherein the conjugate group is attached to the 3′-end of the sense RNAi oligonucleotide.

[0213] Embodiment 83. The oligomeric duplex of any of embodiments 78-80, wherein the conjugate group is attached via the 2′ position of a ribosyl sugar moiety at an internal position of the sense RNAi oligonucleotide.

[0214] Embodiment 84. The oligomeric compound of any of embodiments 54-59 or the oligomeric duplex of any of embodiments 77-83, wherein at least one conjugate group comprises a C₁₆ alkyl group.

[0215] Embodiment 85. The oligomeric duplex of embodiment 62, wherein the second oligomeric compound comprises a terminal group.

[0216] Embodiment 86. An antisense agent comprising an antisense compound, wherein the antisense compound is the oligomeric compound of any of embodiments 1-61.

[0217] Embodiment 87. The antisense agent of embodiment 86, wherein the antisense agent is the oligomeric duplex of any of embodiments 62-85.

[0218] Embodiment 88. The antisense agent of embodiment 86 or embodiment 87, wherein the antisense agent is:
[0219] i) an RNase H agent capable of reducing the amount of APOE nucleic acid through the activation of RNase H; or
[0220] ii) an RNAi agent capable of reducing the amount of APOE nucleic acid through the activation of RISC/Ago2.

[0221] Embodiment 89. The antisense agent of any of embodiments 86-88, wherein the antisense agent comprises a conjugate group, wherein the conjugate group comprises a cell-targeting moiety.

[0222] Embodiment 90. A chirally enriched population of oligomeric compounds of any of embodiments 1-61, wherein the population is enriched for modified oligonucleotides comprising at least one particular phosphorothioate internucleoside linkage having a particular stereochemical configuration.

[0223] Embodiment 91. The chirally enriched population of embodiment 90, wherein the population is enriched for modified oligonucleotides comprising at least one particular phosphorothioate internucleoside linkage having the (Sp) or (Rp) configuration.

[0224] Embodiment 92. The chirally enriched population of embodiment 90, wherein the population is enriched for modified oligonucleotides having a particular, independently selected stereochemical configuration at each phosphorothioate internucleoside linkage.

[0225] Embodiment 93. The chirally enriched population of embodiment 90, wherein the population is enriched for modified oligonucleotides having the (Rp) configuration at one particular phosphorothioate internucleoside linkage and the (Sp) configuration at each of the remaining phosphorothioate internucleoside linkages.

[0226] Embodiment 94. The chirally enriched population of embodiment 90, wherein the population is enriched for modified oligonucleotides having at least 3 contiguous phosphorothioate internucleoside linkages in the Sp, Sp, and Rp configurations, in the 5′ to 3′ direction.

[0227] Embodiment 95. A population of oligomeric compounds of any of embodiments 1-61, wherein all of the phosphorothioate internucleoside linkages of the modified oligonucleotide are stereorandom.

[0228] Embodiment 96. A pharmaceutical composition comprising an oligomeric compound of any of embodiments 1-61, an oligomeric duplex of any of embodiments 62-85, an antisense agent of any of embodiments 86-89, or a population of any of embodiments 90-95, and a pharmaceutically acceptable carrier or diluent.

[0229] Embodiment 97. The pharmaceutical composition of embodiment 96, wherein the pharmaceutically acceptable diluent is artificial cerebral spinal fluid (aCSF), sterile saline, or PBS.

[0230] Embodiment 98. The pharmaceutical composition of embodiment 97, wherein the pharmaceutical composition consists essentially of the modified oligonucleotide, the oligomeric duplex, the antisense agent, or the population and PBS or aCSF.

[0231] Embodiment 99. A method comprising administering to a subject an oligomeric compound of any of embodiments 1-61, an oligomeric duplex of any of embodiments 62-85, an antisense agent of any of embodiments 86-89, a population of any of embodiments 90-95, or a pharmaceutical composition of any of embodiments 96-98.

[0232] Embodiment 100. A method of treating a disease associated with APOE comprising administering to a subject having or at risk for developing a disease associated with APOE a therapeutically effective amount of an oligomeric compound of any of embodiments 1-61, an oligomeric duplex of any of embodiments 62-85, an antisense agent of any of embodiments 86-89, a population of any of embodiments 90-95, or a pharmaceutical composition according to any of embodiments 96-98; and thereby treating the disease associated with APOE.

[0233] Embodiment 101. The method of embodiment 100, wherein the APOE-associated disease is Alzheimer's Disease.

[0234] Embodiment 102. The method of any of embodiments 99-101, wherein at least one symptom or hallmark of the APOE-associated disease is ameliorated.

[0235] Embodiment 103. The method of embodiment 102, wherein the symptom or hallmark is cognitive impairment, progressive memory loss, behavioral abnormality, dementia, difficulty performing daily activities, amyloid plaques, neurofibrillary tangles, or neuroinflammation.

[0236] Embodiment 104. The method of any of embodiments 100-103, wherein administering an oligomeric compound of any of embodiments 1-61, an oligomeric duplex of any of embodiments 62-85, an antisense agent of any of embodiments 86-89, a population of any of embodiments 90-95, or a pharmaceutical composition according to any of embodiments 96-98 reduces cognitive impairment, behavioral abnormality, dementia, difficulty performing daily activities, amyloid plaques, neurofibrillary tangles, or neuroinflammation, or slows memory loss in the subject.

[0237] Embodiment 105. The method of any of embodiments 99-104, wherein the subject is human.

[0238] Embodiment 106. A method of reducing expression of APOE in a cell comprising contacting the cell with an oligomeric compound of any of embodiments 1-61, an oligomeric duplex of any of embodiments 62-85, an antisense agent of any of embodiments 86-89, a population of any of embodiments 90-95, or a pharmaceutical composition according to any of embodiments 96-98.

[0239] Embodiment 107. The method of embodiment 106, wherein the cell is a neuron or a glial cell, optionally wherein the cell is an astrocyte or microglial cell.

[0240] Embodiment 108. The method of embodiment 106 or embodiment 107, wherein the cell is a human cell.

[0241] Embodiment 109. Use of an oligomeric compound of any of embodiments 1-61, an oligomeric duplex of any of embodiments 62-85, an antisense agent of any of embodiments 86-89, a population of any of embodiments 90-95, or a pharmaceutical composition according to any of embodiments 96-98 for treating a disease associated with APOE.

[0242] Embodiment 110. Use of an oligomeric compound of any of embodiments 1-61, an oligomeric duplex of any of embodiments 62-85, an antisense agent of any of embodiments 86-89, a population of any of embodiments 90-95, or a pharmaceutical composition according to any of embodiments 96-98 in the manufacture of a medicament for treating a disease associated with APOE.

[0243] Embodiment 111. The use of embodiment 109 or embodiment 110, wherein the APOE-associated disease is Alzheimer's Disease.

[0244] I. Certain Oligonucleotides

[0245] In certain embodiments, provided herein are oligomeric compounds comprising oligonucleotides, which consist of linked nucleosides. Oligonucleotides may be unmodified oligonucleotides (RNA or DNA) or may be modified oligonucleotides. Modified oligonucleotides comprise at least one modification relative to unmodified RNA or DNA. That is, modified oligonucleotides comprise at least one modified nucleoside (comprising a modified sugar moiety and/or a modified nucleobase) and/or at least one modified internucleoside linkage. In certain embodiments, provided herein are RNAi agents comprising antisense RNAi oligonucleotides complementary to APOE and optionally sense RNAi oligonucleotides complementary to the antisense RNAi oligonucleotides. Antisense RNAi oligonucleotides and sense RNAi oligonucleotides typically comprise at least one modified nucleoside and/or at least one modified internucleoside linkage. Certain modified nucleosides and modified internucleoside linkages suitable for use in modified oligonucleotides are described below.

[0246] A. Certain Modified Nucleosides

[0247] Modified nucleosides comprise a modified sugar moiety or a modified nucleobase or both a modified sugar moiety and a modified nucleobase. In certain embodiments, modified nucleosides comprising the following modified sugar moieties and/or the following modifed nucleobases may be incorporated into antisense RNAi oligonucleotides and/or sense RNAi oligonucleotides.

[0248] 1. Certain Sugar Moieties

[0249] In certain embodiments, modified sugar moieties are non-bicyclic modified sugar moieties. In certain embodiments, modified sugar moieties are bicyclic or tricyclic sugar moieties. In certain embodiments, modified sugar moieties are sugar surrogates. Such sugar surrogates may comprise one or more substitutions corresponding to those of other types of modified sugar moieties.

[0250] In certain embodiments, modified sugar moieties are non-bicyclic modified sugar moieties comprising a furanosyl ring with one or more substituent groups none of which bridges two atoms of the furanosyl ring to form a bicyclic structure. Such non bridging substituents may be at any position of the furanosyl, including but not limited to substituents at the 2′, 3′, 4′, and/or 5′ positions. In certain embodiments one or more non-bridging substituent of non-bicyclic modified sugar moieties is branched. Examples of 2′-substituent groups suitable for non-bicyclic modified sugar moieties include but are not limited to: 2′-F, 2′-OCH₃ (“OMe” or “O-methyl”), and 2′-O(CH₂)2OCH₃ (“MOE”). In certain embodiments, 2′-substituent groups are selected from among: halo, allyl, amino, azido, SH, CN, OCN, CF₃, OCF₃, O—C₁-C₁₀ alkoxy, O—C₁-C₁₀ substituted alkoxy, O—C₁-C₁₀ alkyl, O—C₁-C₁₀ substituted alkyl, S-alkyl, N(Rₘ)-alkyl, O-alkenyl, S-alkenyl, N(Rₘ)-alkenyl, O-alkynyl, S-alkynyl, N(Rₘ)-alkynyl, O-alkylenyl-O-alkyl, alkynyl, alkaryl, aralkyl, O-alkaryl, O-aralkyl, O(CH₂)2SCH3, O(CH₂)₂ON(Rₘ)(Rₙ) or OCH₂C(═O)—N(Rₘ)(Rₙ), where each Rₘ and Rₙ is, independently, H, an amino protecting group, or substituted or unsubstituted C₁-C₁₀ alkyl, —O(CH2)2ON(CH3)2 (“DMAOE”), 2′-OCH2OCH2N(CH2)2 (“DMAEOE”), and the 2′-substituent groups described in Cook et al., U.S. Pat. No. 6,531,584; Cook et al., U.S. Pat. No. 5,859,221; and Cook et al., U.S. Pat. No. 6,005,087. Certain embodiments of these 2′-substituent groups can be further substituted with one or more substituent groups independently selected from among: hydroxyl, amino, alkoxy, carboxy, benzyl, phenyl, nitro (NO₂), thiol, thioalkoxy, thioalkyl, halogen, alkyl, aryl, alkenyl and alkynyl. In certain embodiments, non-bicyclic modified sugar moieties comprise a substituent group at the 3′-position. Examples of substituent groups suitable for the 3′-position of modified sugar moieties include but are not limited to alkoxy (e.g., methoxy), alkyl (e.g., methyl, ethyl). In certain embodiments, non-bicyclic modified sugar moieties comprise a substituent group at the 4′-position. Examples of 4′-substituent groups suitable for non-bicyclic modified sugar moieties include but are not limited to alkoxy (e.g., methoxy), alkyl, and those described in Manoharan et al., WO 2015/106128. Examples of 5′-substituent groups suitable for non-bicyclic modified sugar moieties include but are not limited to: 5′-methyl (R or S), 5′-vinyl, ethyl, and 5′-methoxy. In certain embodiments, non-bicyclic modified sugar moieties comprise more than one non-bridging sugar substituent, for example, 2′-F-5′-methyl sugar moieties and the modified sugar moieties and modified nucleosides described in Migawa et al., WO 2008/101157 and Rajeev et al., US2013/0203836).

[0251] In certain embodiments, a 2′-substituted non-bicyclic modified nucleoside comprises a sugar moiety comprising a non-bridging 2′-substituent group selected from: F, NH₂, N₃, OCF₃, OCH₃, O(CH₂)₃NH₂, CH₂CH═CH₂, OCH₂CH═CH₂, OCH₂CH₂OCH₃, O(CH₂)₂SCH₃, O(CH₂)₂ON(Rₘ)(Rₙ), O(CH₂)₂O(CH₂)₂N(CH₃)₂, and N-substituted acetamide (OCH₂C(═O)—N(Rₘ)(Rₙ)), where each Rₘ and Rₙ is, independently, H, an amino protecting group, or substituted or unsubstituted C₁-C₁₀ alkyl.

[0252] In certain embodiments, a 2′-substituted nucleoside non-bicyclic modified nucleoside comprises a sugar moiety comprising a non-bridging 2′-substituent group selected from: F, OCF₃, OCH₃, OCH₂CH₂OCH₃, O(CH₂)₂SCH₃, O(CH₂)₂N(CH₃)₂, O(CH₂)₂O(CH₂)₂N(CH₃)₂, O(CH₂)2ON(CH3)2 (“DMAOE”), OCH2OCH2N(CH2)2 (“DMAEOE”) and OCH₂C(═O)—N(H)CH₃ (“NMA”).

[0253] In certain embodiments, a 2′-substituted non-bicyclic modified nucleoside comprises a sugar moiety comprising a non-bridging 2′-substituent group selected from: F, OCH₃, and OCH₂CH₂OCH₃.

[0254] In naturally occurring nucleic acids, sugars are linked to one another 3′ to 5′. In certain embodiments, oligonucleotides include one or more nucleoside or sugar moiety linked at an alternative position, for example at the 2′ or inverted 5′ to 3′. For example, where the linkage is at the 2′ position, the 2′-substituent groups may instead be at the 3′-position.

[0255] Certain modified sugar moieties comprise a substituent that bridges two atoms of the furanosyl ring to form a second ring, resulting in a bicyclic sugar moiety. Nucleosides comprising such bicyclic sugar moieties have been referred to as bicyclic nucleosides (BNAs), locked nucleosides, or conformationally restricted nucleotides (CRN). Certain such compounds are described in US Patent Publication No. 2013/0190383; and PCT publication WO 2013/036868. In certain such embodiments, the bicyclic sugar moiety comprises a bridge between the 4′ and the 2′ furanose ring atoms. In certain embodiments, the furanose ring is a ribose ring. Examples of such 4′ to 2′ bridging sugar substituents include but are not limited to: 4′-CH₂-2′, 4′-(CH₂)₂-2′, 4′-(CH₂)₃-2′, 4′-CH₂—O-2′ (“LNA”), 4′-CH₂—S-2′, 4′-(CH₂)₂—O-2′ (“ENA”), 4′-CH(CH₃)—O-2′ (referred to as “constrained ethyl” or “cEt” when in the S configuration), 4′-CH₂—O—CH₂-2′, 4′-CH₂—N(R)-2′, 4′-CH(CH₂OCH₃)—O-2′ (“constrained MOE” or “cMOE”) and analogs thereof (see, e.g., Seth et al., U.S. Pat. No. 7,399,845, Bhat et al., U.S. Pat. No. 7,569,686, Swayze et al., U.S. Pat. No. 7,741,457, and Swayze et al., U.S. Pat. No. 8,022,193), 4′-C(CH₃)(CH₃)—O-2′ and analogs thereof (see, e.g., Seth et al., U.S. Pat. No. 8,278,283), 4′-CH₂—N(OCH₃)-2′ and analogs thereof (see, e.g., Prakash et al., U.S. Pat. No. 8,278,425), 4′-CH₂—O—N(CH₃)-2′ (see, e.g., Allerson et al., U.S. Pat. No. 7,696,345 and Allerson et al., U.S. Pat. No. 8,124,745), 4′-CH₂—C(H)(CH₃)-2′ (see, e.g., Zhou, et al., J. Org. Chem., 2009, 74, 118-134), 4′-CH₂—C(═CH₂)-2′ and analogs thereof (see e.g., Seth et al., U.S. Pat. No. 8,278,426), 4′-C(RₐR_{b})—N(R)—O-2′, 4′-C(RₐR_{b})—O—N(R)-2′, 4′-CH₂—O—N(R)-2′, and 4′-CH₂—N(R)—O-2′, wherein each R, R^{a}, and R_{b}, is, independently, H, a protecting group, or C₁-C₁₂ alkyl (see, e.g. Imanishi et al., U.S. Pat. No. 7,427,672).

[0256] In certain embodiments, such 4′ to 2′ bridges independently comprise from 1 to 4 linked groups independently selected from: —[C(Ra)(Rb)]n-, —[C(Ra)(Rb)]n-O—, C(Ra)═C(Rb)—, C(Ra)═N—, C(═NRa)—, —C(═O)—, —C(═S)—, —O—, —Si(Ra)2-, —S(═O)x-, and N(Ra)—;
[0257] wherein:
[0258] x is 0, 1, or 2;
[0259] n is 1, 2, 3, or 4;
[0260] each Ra and Rb is, independently, H, a protecting group, hydroxyl, C1-C12 alkyl, substituted C1-C12 alkyl, C2-C12 alkenyl, substituted C2-C12 alkenyl, C2-C12 alkynyl, substituted C2-C12 alkynyl, C5-C20 aryl, substituted C5-C20 aryl, heterocycle radical, substituted heterocycle radical, heteroaryl, substituted heteroaryl, C5-C7 alicyclic radical, substituted C5-C7 alicyclic radical, halogen, OJ1, NJ1J2, SJ1, N3, COOJ1, acyl (C(═O)—H), substituted acyl, CN, sulfonyl (S(═O)2-J1), or sulfoxyl (S(═O)-J1); and each J1 and J2 is, independently, H, C1-C12 alkyl, substituted C1-C12 alkyl, C2-C12 alkenyl, substituted C2-C12 alkenyl, C2-C12 alkynyl, substituted C2-C12 alkynyl, C5-C20 aryl, substituted C5-C20 aryl, acyl (C(═O)—H), substituted acyl, a heterocycle radical, a substituted heterocycle radical, C1-C12 aminoalkyl, substituted C1-C12 aminoalkyl, or a protecting group.

[0261] Additional bicyclic sugar moieties are known in the art, see, for example: Freier et al., Nucleic Acids Research, 1997, 25(22), 4429-4443, Albaek et al., J. Org. Chem., 2006, 71, 7731-7740, Singh et al., Chem. Commun., 1998, 4, 455-456; Koshkin et al., Tetrahedron, 1998, 54, 3607-3630; Wahlestedt et al., Proc. Natl. Acad. Sci. U.S.A, 2000, 97, 5633-5638; Kumar et al., Bioorg. Med. Chem. Lett., 1998, 8, 2219-2222; Singh et al., J. Org. Chem., 1998, 63, 10035-10039; Srivastava et al., J. Am. Chem. Soc., 2007, 129, 8362-8379; Elayadi et al., Curr. Opinion Invens. Drugs, 2001, 2, 558-561; Braasch et al., Chem. Biol., 2001, 8, 1-7; Orum et al., Curr. Opinion Mol. Ther., 2001, 3, 239-243; Wengel et al., U.S. Pat. No. 7,053,207, Imanishi et al., U.S. Pat. No. 6,268,490, Imanishi et al. U.S. Pat. No. 6,770,748, Imanishi et al., U.S. RE44,779; Wengel et al., U.S. Pat. No. 6,794,499, Wengel et al., U.S. Pat. No. 6,670,461; Wengel et al., U.S. Pat. No. 7,034,133, Wengel et al., U.S. Pat. No. 8,080,644; Wengel et al., U.S. Pat. No. 8,034,909; Wengel et al., U.S. Pat. No. 8,153,365; Wengel et al., U.S. 7,572,582; and Ramasamy et al., U.S. Pat. No. 6,525,191, Torsten et al., WO 2004/106356, Wengel et al., WO 1999/014226; Seth et al., WO 2007/134181; Seth et al., U.S. Pat. No. 7,547,684; Seth et al., U.S. Pat. No. 7,666,854; Seth et al., U.S. Pat. No. 8,088,746; Seth et al., U.S. Pat. No. 7,750,131; Seth et al., U.S. Pat. No. 8,030,467; Seth et al., U.S. Pat. No. 8,268,980; Seth et al., U.S. Pat. No. 8,546,556; Seth et al., U.S. Pat. No. 8,530,640; Migawa et al., U.S. Pat. No. 9,012,421; Seth et al., U.S. Pat. No. 8,501,805; Allerson et al., US2008/0039618; and Migawa et al., US2015/0191727.

[0262] In certain embodiments, bicyclic sugar moieties and nucleosides incorporating such bicyclic sugar moieties are further defined by isomeric configuration. For example, an LNA nucleoside (described herein) may be in the α-L configuration or in the β-D configuration.

[chemical structure]

[0263] α-L-methyleneoxy (4′-CH₂—O-2′) or α-L-LNA bicyclic nucleosides have been incorporated into oligonucleotides that showed antisense activity (Frieden et al., Nucleic Acids Research, 2003, 21, 6365-6372). The addition of locked nucleic acids to siRNAs has been shown to increase siRNA stability in serum, and to reduce off-target effects (Elmen, J. et al., (2005) Nucleic Acids Research 33(1):439-447; Mook, O R. et al., (2007) Mal Cane Ther 6(3):833-843; Grunweller, A. et al., (2003) Nucleic Acids Research 31(12):3185-3193). Herein, general descriptions of bicyclic nucleosides include both isomeric configurations. When the positions of specific bicyclic nucleosides (e.g., LNA or cEt) are identified in exemplified embodiments herein, they are in the β-D configuration, unless otherwise specified.

[0264] In certain embodiments, modified sugar moieties comprise one or more non-bridging sugar substituent and one or more bridging sugar substituent (e.g., 5′-substituted and 4′-2′ bridged sugars).

[0265] In certain embodiments, modified sugar moieties are sugar surrogates. In certain such embodiments, the oxygen atom of the sugar moiety is replaced, e.g., with a sulfur, carbon or nitrogen atom. In certain such embodiments, such modified sugar moieties also comprise bridging and/or non-bridging substituents as described herein. For example, certain sugar surrogates comprise a 4′-sulfur atom and a substitution at the 2′-position (see, e.g., Bhat et al., U.S. Pat. No. 7,875,733 and Bhat et al., U.S. Pat. No. 7,939,677) and/or the 5′ position.

[0266] In certain embodiments, sugar surrogates comprise rings having other than 5 atoms. For example, in certain embodiments, a sugar surrogate comprises a six-membered tetrahydropyran (“THP”). Such tetrahydropyrans may be further modified or substituted. Nucleosides comprising such modified tetrahydropyrans include but are not limited to hexitol nucleic acid (“HNA”), anitol nucleic acid (“ANA”), manitol nucleic acid (“MNA”) (see, e.g., Leumann, CJ. Bioorg. & Med. Chem. 2002, 10, 841-854), fluoro HNA:

[chemical structure]

(“F-HNA”, see e.g. Swayze et al., U.S. Pat. No. 8,088,904; Swayze et al., U.S. Pat. No. 8,440,803; Swayze et al., U.S. Pat. No. 8,796,437; and Swayze et al., U.S. Pat. No. 9,005,906; F-HNA can also be referred to as a F-THP or 3′-fluoro tetrahydropyran), and nucleosides comprising additional modified THP compounds having the formula:

[chemical structure]

wherein, independently, for each of said modified THP nucleoside:
[0267] Bx is a nucleobase moiety;
[0268] T₃ and T₄ are each, independently, an internucleoside linking group linking the modified THP nucleoside to the remainder of an oligonucleotide or one of T₃ and T₄ is an internucleoside linking group linking the modified THP nucleoside to the remainder of an oligonucleotide and the other of T₃ and T₄ is H, a hydroxyl protecting group, a linked conjugate group, or a 5′ or 3′-terminal group; q₁, q₂, q₃, q₄, q₅, q₆ and q₇ are each, independently, H, C₁-C₆ alkyl, substituted C₁-C₆ alkyl, C₂-C₆ alkenyl, substituted C₂-C₆ alkenyl, C₂-C₆ alkynyl, or substituted C₂-C₆ alkynyl; and
[0269] each of R₁ and R₂ is independently selected from among: hydrogen, halogen, substituted or unsubstituted alkoxy, NJ₁J₂, SJ₁, N₃, OC(═X)J₁, OC(═X)NJ₁J₂, NJ₃C(═X)NJ₁J₂, and CN, wherein X is O, S or NJ₁, and each J₁, J₂, and J₃ is, independently, H or C₁-C₆ alkyl.

[0270] In certain embodiments, modified THP nucleosides are provided wherein q₁, q₂, q₃, q₄, q₅, q₆ and q₇ are each H. In certain embodiments, at least one of q₁, q₂, q₃, q₄, q₅, q₆ and q₇ is other than H. In certain embodiments, at least one of q₁, q₂, q₃, q₄, q₅, q₆ and q₇ is methyl. In certain embodiments, modified THP nucleosides are provided wherein one of R₁ and R₂ is F. In certain embodiments, R₁ is F and R₂ is H, in certain embodiments, R₁ is methoxy and R₂ is H, and in certain embodiments, R₁ is methoxyethoxy and R₂ is H.

[0271] In certain embodiments, sugar surrogates comprise rings having more than 5 atoms and more than one heteroatom. For example, nucleosides comprising morpholino sugar moieties and their use in oligonucleotides have been reported (see, e.g., Braasch et al., Biochemistry, 2002, 41, 4503-4510 and Summerton et al., U.S. Pat. No. 5,698,685; Summerton et al., U.S. Pat. No. 5,166,315; Summerton et al., U.S. Pat. No. 5,185,444; and Summerton et al., U.S. Pat. No. 5,034,506). As used here, the term “morpholino” means a sugar surrogate having the following structure:

[chemical structure]

In certain embodiments, morpholinos may be modified, for example by adding or altering various substituent groups from the above morpholino structure. Such sugar surrogates are referred to herein as “modified morpholinos.”

[0272] In certain embodiments, sugar surrogates comprise acyclic moieites. Examples of nucleosides and oligonucleotides comprising such acyclic sugar surrogates include but are not limited to: peptide nucleic acid (“PNA”), acyclic butyl nucleic acid (see, e.g., Kumar et al., Org. Biomol. Chem., 2013, 11, 5853-5865), and nucleosides and oligonucleotides described in Manoharan et al., WO2011/133876. In certain embodiments, sugar surrogates comprise acyclic moieties. Examples of nucleosides and oligonucleotides comprising such acyclic sugar surrogates include, but are not limited to: peptide nucleic acid (“PNA”), acyclic butyl nucleic acid (see, e.g., Kumar et al., Org. Biomol. Chem., 2013, 11, 5853-5865), and nucleosides and oligonucleotides described in Manoharan et al., US2013/130378. Representative U.S. patents that teach the preparation of PNA compounds include, but are not limited to, U.S. Pat. Nos. 5,539,082; 5,714,331; and 5,719,262. Additional PNA compounds suitable for use in the RNAi oligonucleotides of the invention are described in, for example, in Nielsen et al., Science, 1991, 254, 1497-1500.

[0273] In certain embodiments, sugar surrogates are the “unlocked” sugar structure of UNA (unlocked nucleic acid) nucleosides. UNA is an unlocked acyclic nucleic acid, wherein any of the bonds of the sugar has been removed, forming an unlocked sugar surrogate. Representative U.S. publications that teach the preparation of UNA include, but are not limited to, U.S. Pat. No. 8,314,227; and US Patent Publication Nos. 2013/0096289; 2013/0011922; and 2011/0313020, the entire contents of each of which are hereby incorporated herein by reference.

[0274] In certain embodiments, sugar surrogates are the glycerol as found in GNA (glycol nucleic acid) nucleosides as depicted below:

[chemical structure]

[0275] where Bx represents any nucleobase.

[0276] Many other bicyclic and tricyclic sugar and sugar surrogatsare known in the art that can be used in modified nucleosides.

[0277] 2. Certain Modified Nucleobases

[0278] In certain embodiments, modified oligonucleotides comprise one or more nucleoside comprising an unmodified nucleobase. In certain embodiments, modified oligonucleotides comprise one or more nucleoside comprising a modified nucleobase. In certain embodiments, modified oligonucleotides comprise one or more nucleoside that does not comprise a nucleobase, referred to as an abasic nucleoside. In certain embodiments, modified oligonucleotides comprise one or more inosine nucleosides (i.e., nucleosides comprising a hypoxanthine nucleobase).

[0279] In certain embodiments, modified nucleobases are selected from: 5-substituted pyrimidines, 6-azapyrimidines, alkyl or alkynyl substituted pyrimidines, alkyl substituted purines, and N—2, N—6 and 0-6 substituted purines. In certain embodiments, modified nucleobases are selected from: 5-methylcytosine, 2-aminopropyladenine, 5-hydroxymethyl cytosine, xanthine, hypoxanthine, 2-aminoadenine, 6-N-methylguanine, 6-N-methyladenine, 2-propyladenine, 2-thiouracil, 2-thiothymine and 2-thiocytosine, 5-propynyl (—C≡C—CH₃) uracil, 5-propynylcytosine, 6-azouracil, 6-azocytosine, 6-azothymine, 5-ribosyluracil (pseudouracil), 4-thiouracil, 8-halo, 8-amino, 8-thiol, 8-thioalkyl, 8-hydroxyl, 8-aza and other 8-substituted purines, 5-halo, particularly 5-bromo, 5-trifluoromethyl, 5-halouracil, and 5-halocytosine, 7-methylguanine, 7-methyladenine, 2-F-adenine, 2-aminoadenine, 7-deazaguanine, 7-deazaadenine, 3-deazaguanine, 3-deazaadenine, 6-N-benzoyladenine, 2-N-isobutyrylguanine, 4-N-benzoylcytosine, 4-N-benzoyluracil, 5-methyl 4-N-benzoylcytosine, 5-methyl 4-N-benzoyluracil, universal bases, hydrophobic bases, promiscuous bases, size-expanded bases, and fluorinated bases. Further modified nucleobases include tricyclic pyrimidines, such as 1,3-diazaphenoxazine-2-one, 1,3-diazaphenothiazine-2-one and 9-(2-aminoethoxy)-1,3-diazaphenoxazine-2-one (G-clamp). Modified nucleobases may also include those in which the purine or pyrimidine base is replaced with other heterocycles, for example 7-deaza-adenine, 7-deazaguanosine, 2-aminopyridine and 2-pyridone. Further nucleobases include those disclosed in Merigan et al., U.S. Pat. No. 3,687,808, those disclosed in The Concise Encyclopedia Of Polymer Science And Engineering, Kroschwitz, J. I., Ed., John Wiley & Sons, 1990, 858-859; Englisch et al., Angewandte Chemie, International Edition, 1991, 30, 613; Sanghvi, Y. S., Chapter 15, Antisense Research and Applications, Crooke, S. T. and Lebleu, B., Eds., CRC Press, 1993, 273-288; and those disclosed in Chapters 6 and 15, Antisense Drug Technology, Crooke S. T., Ed., CRC Press, 2008, 163-166 and 442-443.

[0280] Publications that teach the preparation of certain of the above noted modified nucleobases as well as other modified nucleobases include without limitation, Manoharan et al., US2003/0158403; Manoharan et al., US2003/0175906; Dinh et al., U.S. Pat. No. 4,845,205; Spielvogel et al., U.S. Pat. No. 5,130,302; Rogers et al., U.S. Pat. No. 5,134,066; Bischofberger et al., U.S. Pat. No. 5,175,273; Urdea et al., U.S. Pat. No. 5,367,066; Benner et al., U.S. Pat. No. 5,432,272; Matteucci et al., U.S. Pat. No. 5,434,257; Gmeiner et al., U.S. Pat. No. 5,457,187; Cook et al., U.S. 5,459,255; Froehler et al., U.S. Pat. No. 5,484,908; Matteucci et al., U.S. Pat. No. 5,502,177; Hawkins et al., U.S. Pat. No. 5,525,711; Haralambidis et al., U.S. Pat. No. 5,552,540; Cook et al., U.S. Pat. No. 5,587,469; Froehler et al., U.S. Pat. No. 5,594,121; Switzer et al., U.S. Pat. No. 5,596,091; Cook et al., U.S. Pat. No. 5,614,617; Froehler et al., U.S. Pat. No. 5,645,985; Cook et al., U.S. Pat. No. 5,681,941; Cook et al., U.S. Pat. No. 5,811,534; Cook et al., U.S. Pat. No. 5,750,692; Cook et al., U.S. Pat. No. 5,948,903; Cook et al., U.S. Pat. No. 5,587,470; Cook et al., U.S. Pat. No. 5,457,191; Matteucci et al., U.S. Pat. No. 5,763,588; Froehler et al., U.S. Pat. No. 5,830,653; Cook et al., U.S. Pat. No. 5,808,027; Cook et al., U.S. Pat. No. 6,166,199; and Matteucci et al., U.S. Pat. No. 6,005,096.

[0281] 3. Certain Modified Internucleoside Linkages

[0282] The naturally occurring internucleoside linkage of RNA and DNA is a 3′ to 5′ phosphodiester linkage. In certain embodiments, nucleosides of modified oligonucleotides may be linked together using one or more modified internucleoside linkages. The two main classes of internucleoside linking groups are defined by the presence or absence of a phosphorus atom. Representative phosphorus-containing internucleoside linkages include but are not limited to phosphates, which contain a phosphodiester bond (“P═O”) (also referred to as unmodified or naturally occurring linkages), phosphotriesters, methylphosphonates, phosphoramidates, and phosphorothioates (“P═S”), and phosphorodithioates (“HS-P═S”). Representative non-phosphorus containing internucleoside linking groups include but are not limited to methylenemethylimino (—CH₂—N(CH₃)—O—CH₂—), thiodiester, thionocarbamate (—O—C(═O)(NH)—S—); siloxane (—O—SiH₂—O—); and N,N′-dimethylhydrazine (—CH₂—N(CH₃)—N(CH₃)—). Modified internucleoside linkages, compared to naturally occurring phosphate linkages, can be used to alter, typically increase, nuclease resistance of the oligonucleotide. In certain embodiments, internucleoside linkages having a chiral atom can be prepared as a racemic mixture, or as separate enantiomers. Methods of preparation of phosphorous-containing and non-phosphorous-containing internucleoside linkages are well known to those skilled in the art.

[0283] Representative internucleoside linkages having a chiral center include but are not limited to alkylphosphonates and phosphorothioates. Modified oligonucleotides comprising internucleoside linkages having a chiral center can be prepared as populations of modified oligonucleotides comprising stereorandom internucleoside linkages, or as populations of modified oligonucleotides comprising phosphorothioate linkages in particular stereochemical configurations. In certain embodiments, populations of modified oligonucleotides comprise phosphorothioate internucleoside linkages wherein all of the phosphorothioate internucleoside linkages are stereorandom. Such modified oligonucleotides can be generated using synthetic methods that result in random selection of the stereochemical configuration of each phosphorothioate linkage. Nonetheless, each individual phosphorothioate of each individual oligonucleotide molecule has a defined stereoconfiguration. In certain embodiments, populations of modified oligonucleotides are enriched for modified oligonucleotides comprising one or more particular phosphorothioate internucleoside linkages in a particular, independently selected stereochemical configuration. In certain embodiments, the particular configuration of the particular phosphorothioate linkage is present in at least 65% of the molecules in the population. In certain embodiments, the particular configuration of the particular phosphorothioate linkage is present in at least 70% of the molecules in the population. In certain embodiments, the particular configuration of the particular phosphorothioate linkage is present in at least 80% of the molecules in the population. In certain embodiments, the particular configuration of the particular phosphorothioate linkage is present in at least 90% of the molecules in the population. In certain embodiments, the particular configuration of the particular phosphorothioate linkage is present in at least 99% of the molecules in the population. Such chirally enriched populations of modified oligonucleotides can be generated using synthetic methods known in the art, e.g., methods described in Oka et al., JACS 125, 8307 (2003), Wan et al. Nuc. Acid. Res. 42, 13456 (2014), and WO 2017/015555. In certain embodiments, a population of modified oligonucleotides is enriched for modified oligonucleotides having at least one indicated phosphorothioate in the (Sp) configuration. In certain embodiments, a population of modified oligonucleotides is enriched for modified oligonucleotides having at least one phosphorothioate in the (Rp) configuration. In certain embodiments, modified oligonucleotides comprising (Rp) and/or (Sp) phosphorothioates comprise one or more of the following formulas, respectively, wherein “B” indicates a nucleobase:

[chemical structure]

Unless otherwise indicated, chiral internucleoside linkages of modified oligonucleotides described herein can be stereorandom or in a particular stereochemical configuration.

[0284] Neutral internucleoside linkages include, without limitation, phosphotriesters, methylphosphonates, MMI (3′-CH₂—N(CH₃)—O-5′), amide-3 (3′—CH₂—C(═O)—N(H)-5′), amide-4 (3′-CH₂—N(H)—C(═O)-5′), formacetal (3′-O—CH₂—O-5′), methoxypropyl (MOP), and thioformacetal (3′-S—CH₂—O-5′). Further neutral internucleoside linkages include nonionic linkages comprising siloxane (dialkylsiloxane), carboxylate ester, carboxamide, sulfide, sulfonate ester and amides (See for example: Carbohydrate Modifications in Antisense Research; Y. S. Sanghvi and P. D. Cook, Eds., ACS Symposium Series 580; Chapters 3 and 4, 40-65). Further neutral internucleoside linkages include nonionic linkages comprising mixed N, O, S and CH₂ component parts.

[0285] In certain embodiments, modified oligonucleotides (such as antisense RNAi oligonucleotides and/or sense RNAi oligonucleotides) comprise one or more inverted nucleoside, as shown below:

[chemical structure]

wherein each Bx independently represents any nucleobase.

[0286] In certain embodiments, an inverted nucleoside is terminal (i.e., the last nucleoside on one end of an oligonucleotide) and so only one internucleoside linkage depicted above will be present. In certain such embodiments, additional features (such as a conjugate group) may be attached to the inverted nucleoside. Such terminal inverted nucleosides can be attached to either or both ends of an oligonucleotide.

[0287] In certain embodiments, such groups lack a nucleobase and are referred to herein as inverted sugar moieties. In certain embodiments, an inverted sugar moiety is terminal (i.e., attached to the last nucleoside on one end of an oligonucleotide) and so only one internucleoside linkage above will be present. In certain such embodiments, additional features (such as a conjugate group) may be attached to the inverted sugar moiety. Such terminal inverted sugar moieties can be attached to either or both ends of an oligonucleotide.

[0288] In certain embodiments, nucleic acids can be linked 2′ to 5′ rather than the standard 3′ to 5′ linkage. Such a linkage is illustrated below.

[chemical structure]

wherein each Bx represents any nucleobase.

[0289] B. Certain Motifs

[0290] In certain embodiments, modified oligonucleotides comprise one or more modified nucleosides comprising a modified sugar moiety. In certain embodiments, modified oligonucleotides comprise one or more modified nucleosides comprising a modified nucleobase. In certain embodiments, modified oligonucleotides comprise one or more modified internucleoside linkage. In such embodiments, the modified, unmodified, and differently modified sugar moieties, nucleobases, and/or internucleoside linkages of a modified oligonucleotide define a pattern or motif. In certain embodiments, the patterns of sugar moieties, nucleobases, and internucleoside linkages are each independent of one another. Thus, a modified oligonucleotide may be described by its sugar motif, nucleobase motif and/or internucleoside linkage motif (as used herein, nucleobase motif describes the modifications to the nucleobases independent of the sequence of nucleobases).

[0291] 1. Certain Sugar Motifs

[0292] In certain embodiments, oligonucleotides comprise one or more type of modified sugar and/or unmodified sugar moiety arranged along the oligonucleotide or region thereof in a defined pattern or sugar motif. In certain instances, such sugar motifs include but are not limited to any of the sugar modifications discussed herein.

### Uniformly Modified Oligonucleotides

[0293] In certain embodiments, modified oligonucleotides comprise or consist of a region having a fully modified sugar motif. In such embodiments, each nucleoside of the fully modified region of the modified oligonucleotide comprises a modified sugar moiety. In certain embodiments, each nucleoside of the entire modified oligonucleotide comprises a modified sugar moiety. In certain embodiments, modified oligonucleotides comprise or consist of a region having a fully modified sugar motif, wherein each nucleoside within the fully modified region comprises the same modified sugar moiety, referred to herein as a uniformly modified sugar motif. In certain embodiments, a fully modified oligonucleotide is a uniformly modified oligonucleotide.

### Gapmer Oligonucleotides

[0294] In certain embodiments, modified oligonucleotides comprise or consist of a region having a gapmer motif, which is defined by two external regions or “wings” and a central or internal region or “gap.” The three regions of a gapmer motif (the 5′-wing, the gap, and the 3′-wing) form a contiguous sequence of nucleosides wherein at least some of the sugar moieties of the nucleosides of each of the wings differ from at least some of the sugar moieties of the nucleosides of the gap. Specifically, at least the sugar moieties of the nucleosides of each wing that are closest to the gap (the 3′-most nucleoside of the 5′-wing and the 5′-most nucleoside of the 3′-wing) differ from the sugar moiety of the neighboring gap nucleosides, thus defining the boundary between the wings and the gap (i.e., the wing/gap junction). In certain embodiments, the sugar moieties within the gap are the same as one another. In certain embodiments, the gap includes one or more nucleoside having a sugar moiety that differs from the sugar moiety of one or more other nucleosides of the gap. In certain embodiments, the sugar motifs of the two wings are the same as one another (symmetric gapmer). In certain embodiments, the sugar motif of the 5′-wing differs from the sugar motif of the 3′-wing (asymmetric gapmer).

[0295] In certain embodiments, the wings of a gapmer comprise 1-6 nucleosides. In certain embodiments, each nucleoside of each wing of a gapmer comprises a modified sugar moiety. In certain embodiments, at least one nucleoside of each wing of a gapmer comprises a modified sugar moiety. In certain embodiments, at least two nucleosides of each wing of a gapmer comprises a modified sugar moiety. In certain embodiments, at least three nucleosides of each wing of a gapmer comprises a modified sugar moiety. In certain embodiments, at least four nucleosides of each wing of a gapmer comprises a modified sugar moiety.

[0296] In certain embodiments, the gap of a gapmer comprises 7-12 nucleosides. In certain embodiments, each nucleoside of the gap of a gapmer comprises a 2′-β-D-deoxyribosyl sugar moiety. In certain embodiments, at least one nucleoside of the gap of a gapmer comprises a modified sugar moiety.

[0297] In certain embodiments, the gapmer is a deoxy gapmer. In certain embodiments, the nucleosides on the gap side of each wing/gap junction comprise 2′-deoxyribosyl sugar moieties and the nucleosides on the wing sides of each wing/gap junction comprise modified sugar moieties. In certain embodiments, each nucleoside of the gap comprises a 2′-β-D-deoxyribosyl sugar moiety. In certain embodiments, each nucleoside of each wing of a gapmer comprises a modified sugar moiety. In certain embodiments, at least one nucleoside of the gap of a gapmer comprises a modified sugar moiety. In certain embodiments, at least one nucleoside of the gap of a gapmer comprises a 2′-OMe sugar moiety.

[0298] Herein, the lengths (number of nucleosides) of the three regions of a gapmer may be provided using the notation [# of nucleosides in the 5′-wing]—[# of nucleosides in the gap]—[# of nucleosides in the 3′-wing]. Thus, a 3-10-3 gapmer consists of 3 linked nucleosides in each wing and 10 linked nucleosides in the gap. Where such nomenclature is followed by a specific modification, that modification is the modification in each sugar moiety of each wing and the gap nucleosides comprise 2′-β-D-deoxyribosyl sugar moieties. Thus, a 5-10-5 MOE gapmer consists of 5 linked 2′-MOE modified nucleosides in the 5′-wing, 10 linked 2′-β-D-deoxynucleosides in the gap, and 5 linked 2′-MOE modified nucleosides in the 3′-wing. A 3-10-3 cEt gapmer consists of 3 linked cEt nucleosides in the 5′-wing, 10 linked 2′-β-D-deoxynucleosides in the gap, and 3 linked cEt nucleosides in the 3′-wing. A 6-10-4 MOE gapmer consists of 6 linked 2′-MOE modified nucleosides in the 5′-wing, 10 linked 2′-β-D-deoxynucleosides in the gap, and 4 linked 2′-MOE modified nucleosides in the 3′-wing. A 5-8-5 gapmer consists of 5 linked nucleosides comprising a modified sugar moiety in the 5′-wing, 8 linked 2′-β-D-deoxynucleosides in the gap, and 5 linked nucleosides comprising a modified sugar moiety in the 3′-wing. A 5-8-5 mixed gapmer has at least two different modified sugar moieties in the 5′- and/or the 3′-wing.

[0299] In certain embodiments, modified oligonucleotides are 5-10-5 MOE gapmers. In certain embodiments, modified oligonucleotides are 3-10-3 BNA gapmers. In certain embodiments, modified oligonucleotides are 3-10-3 cEt gapmers. In certain embodiments, modified oligonucleotides are 3-10-3 LNA gapmers. In certain embodiments, modified oligonucleotides are 6-10-4 MOE gapmers. In certain embodiments, modified oligonucleotides are 5-8-5 MOE gapmers or 5-8-5 mixed gapmers.

[0300] In certain embodiments, modified oligonucleotides are 5-10-5 MOE gapmers that consist of 5 linked 2′-MOE modified nucleosides in the 5′-wing, 10 linked 2′-β-D-deoxynucleosides in the gap, and 5 linked 2′-MOE modified nucleosides in the 3′-wing. In certain embodiments, modified nucleosides have a sugar motif of eeeeeddddddddddeeeee, where each “e” represents a nucleoside comprising a 2′-MOE modified sugar moiety, and each “d” represents a nucleoside comprising a 2′-β-D-deoxyribosyl sugar moiety.

[0301] In certain embodiments, modified oligonucleotides are 3-10-3 cEt gapmers that consist of 3 linked cEt nucleosides in the 5′-wing, 10 linked 2′-β-D-deoxynucleosides in the gap, and 3 linked cEt nucleosides in the 3′-wing. In certain embodiments, modified nucleosides have a sugar motif of kkkddddddddddkkk, wherein each “k” represents a nucleoside comprising a cEt modified sugar moiety, and each “d” represents a nucleoside comprising a 2′-β-D-deoxyribosyl sugar moiety.

[0302] In certain embodiments, modified oligonucleotides are 6-10-4 MOE gapmers that consist of 6 linked 2′-MOE modified nucleosides in the 5′-wing, 10 linked 2′-β-D-deoxynucleosides in the gap, and 4 linked 2′-MOE modified nucleosides in the 3′-wing. In certain embodiments, modified nucleosides have a sugar motif of eeeeeeddddddddddeeee, where each “e” represents a nucleoside comprising a 2′-MOE modified sugar moiety, and each “d” represents a nucleoside comprising a 2′-β-D-deoxyribosyl sugar moiety.

[0303] In certain embodiments, modified oligonucleotides are 5-8-5 MOE gapmers that consist of 5 linked 2′-MOE modified nucleosides in the 5′-wing, 8 linked 2′-β-D-deoxynucleosides in the gap, and 5 linked 2′-MOE modified nucleosides in the 3′-wing. In certain embodiments, modified nucleosides have a sugar motif of eeeeeddddddddeeeee, where each “e” represents a nucleoside comprising a 2′-MOE modified sugar moiety, and each “d” represents a nucleoside comprising a 2′-β-D-deoxyribosyl sugar moiety.

[0304] In certain embodiments, modified oligonucleotides are 5-8-5 mixed gapmers that consist of 5 linked 2′-MOE modified nucleosides in the 5′-wing, 8 linked 2′-β-D-deoxynucleosides in the gap, and a mixture of cEt and 2′-MOE modified nucleosides in the 3′-wing. In certain embodiments, modified nucleosides have a sugar motif of eeeeeddddddddkkeee, where each “e” represents a nucleoside comprising a 2′-MOE modified sugar moiety, each “d” represents a nucleoside comprising a 2′-β-D-deoxyribosyl sugar moiety, and each “k” represents a nucleoside comprising a cEt modified sugar moiety. In certain embodiments, modified nucleosides have a sugar motif of eeeeeddddddddkeeee, where each “e” represents a nucleoside comprising a 2′-MOE modified sugar moiety, each “d” represents a nucleoside comprising a 2′-β-D-deoxyribosyl sugar moiety, and each “k” represents a nucleoside comprising a cEt modified sugar moiety.

### Antisense RNAi Oligonucleotides

[0305] In certain embodiments, the sugar moiety of at least one nucleoside of an antisense RNAi oligonucleotide is a modified sugar moiety.

[0306] In certain such embodiments, at least one nucleoside of the antisense RNAi oligonucleotide comprises a 2′-OMe modified sugar moiety. In certain embodiments, at least 2 nucleosides comprise 2′-OMe modified sugar moieties. In certain embodiments, at least 5 nucleosides comprise 2′-OMe modified sugar moieties. In certain embodiments, at least 8 nucleosides comprise 2′-OMe modified sugar moieties. In certain embodiments, at least 10 nucleosides comprise 2′-OMe modified sugar moieties. In certain embodiments, at least 12 nucleosides comprise 2′-OMe modified sugar moieties. In certain embodiments, at least 14 nucleosides comprise 2′-OMe modified sugar moieties. In certain embodiments, at least 15 nucleosides comprise 2′-OMe modified sugar moieties. In certain embodiments, at least 17 nucleosides comprise 2′-OMe modified sugar moieties. In certain such embodiments, at least 18 nucleosides comprise 2′-OMe modified sugar moieties. In certain such embodiments, at least 20 nucleosides comprise 2′-OMe modified sugar moieties. In certain embodiments, at least 21 nucleosides comprise 2′-OMe modified sugar moieties. In certain such embodiments, the remainder of the nucleosides are 2′-F modified.

[0307] In certain embodiments, at least one nucleoside of the antisense RNAi oligonucleotide comprises a 2′-F modified sugar moiety. In certain embodiments, at least 2 nucleosides comprise 2′-F modified sugar moieties. In certain embodiments, at least 3 nucleosides comprise 2′-F modified sugar moieties. In certain embodiments, at least 4 nucleosides comprise 2′-F modified sugar moieties. In certain embodiments, one, but not more than one nucleoside comprises a 2′-F modified sugar. In certain embodiments, 1 or 2 nucleosides comprise 2′-F modified sugar moieties. In certain embodiments, 1-3 nucleosides comprise 2′-F modified sugar moieties. In certain embodiments, at least 1-4 nucleosides comprise 2′-F modified sugar moieties. In certain embodiments, antisense RNAi oligonucleotides have a block of 2-4 contiguous 2′-F modified nucleosides. In certain embodiments, 4 nucleosides of an antisense RNAi oligonucleotide are 2′-F modified nucleosides and 3 of those 2′-F modified nucleosides are contiguous. In certain such embodiments, the remainder of the nucleosides are 2′-OMe modified.

[0308] In certain embodiments, at least one nucleoside of the antisense RNAi oligonucleotide comprises a 2′-OMe modified sugar moiety and at least one nucleoside comprises a 2′-F modified sugar moiety. In certain embodiments, at least 1, 2, 3, 4, 5, 6, 7, 8, 9 or 10 nucleosides comprises a 2′-OMe modified sugar moiety and at least 1, 2, 3, 4, 5, 6, 7, 8, 9 or 10 nucleosides comprises a 2′-F modified sugar moiety. In certain embodiments, the antisense RNAi oligonucleotide comprises a sugar motif of fyf or yfy, wherein each “f” represents a 2′-F modified sugar moiety and each “y” represents a 2′-OMe modified sugar moiety. In certain embodiments, the antisense RNAi oligonucleotide has a sugar motif of yfyfyfyfyfyfyfyfyfyfyyy, wherein each “f” represents a 2′-F modified sugar moiety and each “y” represents a 2′-OMe modified sugar moiety.

[0309] In certain embodiments, at least one nucleoside of the antisense RNAi oligonucleotide comprises a 2′-MOE modified sugar moiety. In certain embodiments, the antisense RNAi oligonucleotide further comprises one or more 2′-OMe modified sugar moieties and one or more 2′-F modified sugar moieties. In certain embodiments, at least 1, 2, 3, 4, 5, 6, 7, 8, 9, 10, 11, 12, 13, 14, 15, 16, 17, or 18 nucleosides comprises a 2′-OMe modified sugar moiety. In certain embodiments, at least 1, 2, 3, or 4 nucleosides comprises a 2′-F modified sugar moiety. In certain embodiments, the antisense RNAi oligonucleotide has a sugar motif of efyyyfyyyyyyyfyfyyyyyyy, wherein ‘e’ represents a 2′-MOE modified sugar moiety, each “y” represents a 2′-O-methylribosyl sugar, and each “f” represents a 2′-fluororibosyl sugar.

### Sense RNAi Oligonucleotides

[0310] In certain embodiments, the sugar moiety of at least one nucleoside of a sense RNAi oligonucleotides is a modified sugar moiety.

[0311] In certain such embodiments, at least one nucleoside of the sense RNAi oligonucleotide comprises a 2′-OMe modified sugar moiety. In certain embodiments, at least 2 nucleosides comprise 2′-OMe modified sugar moieties. In certain embodiments, at least 5 nucleosides comprise 2′-OMe modified sugar moieties. In certain embodiments, at least 8 nucleosides comprise 2′-OMe modified sugar moieties. In certain embodiments, at least 10 nucleosides comprise 2′-OMe modified sugar moieties. In certain embodiments, at least 12 nucleosides comprise 2′-OMe modified sugar moieties. In certain embodiments, at least 14 nucleosides comprise 2′-OMe modified sugar moieties. In certain embodiments, at least 15 nucleosides comprise 2′-OMe modified sugar moieties. In certain embodiments, at least 17 nucleosides comprise 2′-OMe modified sugar moieties. In certain such embodiments, at least 18 nucleosides comprise 2′-OMe modified sugar moieties. In certain such embodiments, at least 20 nucleosides comprise 2′-OMe modified sugar moieties. In certain such embodiments, at least 21 nucleosides comprise 2′-OMe modified sugar moieties.

[0312] In certain embodiments, at least one nucleoside of the sense RNAi oligonucleotide comprises a 2′-F modified sugar moiety. In certain embodiments, at least 2 nucleosides comprise 2′-F modified sugar moieties. In certain embodiments, at least 3 nucleosides comprise 2′-F modified sugar moieties. In certain embodiments, at least 4 nucleosides comprise 2′-F modified sugar moieties. In certain embodiments, one, but not more than nucleoside comprises a 2′-F modified sugar moiety. In certain embodiments, 1 or 2 nucleosides comprise 2′-F modified sugar moieties. In certain embodiments, 1-3 nucleosides comprise 2′-F modified sugar moieties. In certain embodiments, at least 1-4 nucleosides comprise 2′-F modified sugar moieties. In certain embodiments, sense RNAi oligonucleotides have a block of 2-4 contiguous 2′-F modified nucleosides. In certain embodiments, 4 nucleosides of a sense RNAi oligonucleotide are 2′-F modified nucleosides and 3 of those 2′-F modified nucleosides are contiguous. In certain such embodiments the remainder of the nucleosides are 2′OMe modified.

[0313] In certain embodiments, at least one nucleoside of the sense RNAi oligonucleotide comprises a 2′-OMe modified sugar moiety and at least one nucleoside comprises a 2′-F modified sugar moiety. In certain embodiments, at least 1, 2, 3, 4, 5, 6, 7, 8, 9, 10, 11, 12, 13, 14, 15, 16, or 17 nucleosides comprises a 2′-OMe modified sugar moiety and at least 1, 2, 3, 4, 5, 6, 7, 8, 9 or 10 nucleosides comprises a 2′-F modified sugar moiety. In certain embodiments, the sense RNAi oligonucleotide comprises a sugar motif of fyf or yfy, wherein each “f” represents a 2′-F modified sugar moiety and each “y” represents a 2′-OMe modified sugar moiety. In certain embodiments, the sense RNAi oligonucleotide has a sugar motif of fyfyfyfyfyfyfyfyfyfyf, wherein each “f” represents a 2′-F modified sugar moiety and each “y” represents a 2′-OMe modified sugar moiety. In certain embodiments, the sense RNAi oligonucleotide has a sugar motif of yyyyyyfyfffyyyyyyyyyy, wherein each “y” represents a 2′-O-methylribosyl sugar, and each “f” represents a 2′-fluororibosyl sugar.

[0314] 2. Certain Nucleobase Motifs

[0315] In certain embodiments, oligonucleotides comprise modified and/or unmodified nucleobases arranged along the oligonucleotide or region thereof in a defined pattern or motif. In certain embodiments, each nucleobase is modified. In certain embodiments, none of the nucleobases are modified. In certain embodiments, each purine or each pyrimidine is modified. In certain embodiments, each adenine is modified. In certain embodiments, each guanine is modified. In certain embodiments, each thymine is modified. In certain embodiments, each uracil is modified. In certain embodiments, each cytosine is modified. In certain embodiments, some or all of the cytosine nucleobases in a modified oligonucleotide are 5-methyl cytosines. In certain embodiments, all of the cytosine nucleobases are 5-methyl cytosines and all of the other nucleobases of the modified oligonucleotide are unmodified nucleobases.

[0316] In certain embodiments, modified oligonucleotides comprise a block of modified nucleobases. In certain such embodiments, the block is at the 3′-end of the oligonucleotide. In certain embodiments the block is within 3 nucleosides of the 3′-end of the oligonucleotide. In certain embodiments, the block is at the 5′-end of the oligonucleotide. In certain embodiments the block is within 3 nucleosides of the 5′-end of the oligonucleotide.

### Gapmer Oligonucleotides

[0317] In certain embodiments, oligonucleotides having a gapmer motif comprise a nucleoside comprising a modified nucleobase. In certain such embodiments, one nucleoside comprising a modified nucleobase is in the central gap of an oligonucleotide having a gapmer motif. In certain such embodiments, the sugar moiety of said nucleoside is a 2′-deoxyribosyl sugar moiety. In certain embodiments, the modified nucleobase is selected from: a 2-thiopyrimidine and a 5-propynepyrimidine.

### Antisense RNAi Oligonucleotides

[0318] In certain embodiments, one nucleoside of an antisense RNAi oligonucleotide is a UNA. In certain embodiments, one nucleoside of an antisense RNAi oligonucleotide is a GNA. In certain embodiments, 1-4 nucleosides of an antisense RNAi oligonucleotide is/are DNA. In certain such embodiments, the 1-4 DNA nucleosides are at one or both ends of the antisense RNAi oligonucleotide.

### Sense RNAi Oligonucleotides

[0319] In certain embodiments, one nucleoside of a sense RNAi oligonucleotide is a UNA. In certain embodiments, one nucleoside of a sense RNAi oligonucleotide is a GNA. In certain embodiments, 1-4 nucleosides of a sense RNAi oligonucleotide is/are DNA. In certain such embodiments, the 1-4 DNA nucleosides are at one or both ends of the sense RNAi oligonucleotide.

[0320] 3. Certain Internucleoside Linkage Motifs

[0321] In certain embodiments, oligonucleotides comprise modified and/or unmodified internucleoside linkages arranged along the oligonucleotide or region thereof in a defined pattern or motif. In certain embodiments, each internucleoside linking group is a phosphodiester internucleoside linkage (P═0). In certain embodiments, each internucleoside linking group of a modified oligonucleotide is a phosphorothioate internucleoside linkage (P═S). In certain embodiments, each internucleoside linkage of a modified oligonucleotide is independently selected from a phosphorothioate internucleoside linkage and phosphodiester internucleoside linkage. In certain embodiments, each phosphorothioate internucleoside linkage is independently selected from a stereorandom phosphorothioate a (Sp) phosphorothioate, and a (Rp) phosphorothioate.

### Gapmer Oligonucleotides

[0322] In certain embodiments, the sugar motif of a modified oligonucleotide is a gapmer and the internucleoside linkages within the gap are all modified. In certain embodiments, some or all of the internucleoside linkages in the wings are unmodified phosphodiester internucleoside linkages. In certain embodiments, the terminal internucleoside linkages are modified. In certain embodiments, the sugar motif of a modified oligonucleotide is a gapmer, and the internucleoside linkage motif comprises at least one phosphodiester internucleoside linkage in at least one wing, wherein the at least one phosphodiester linkage is not a terminal internucleoside linkage, and the remaining internucleoside linkages are phosphorothioate internucleoside linkages. In certain embodiments, all of the phosphorothioate linkages are stereorandom. In certain embodiments, all of the phosphorothioate linkages in the wings are (Sp) phosphorothioates, and the gap comprises at least one Sp, Sp, Rp motif. In certain embodiments, populations of modified oligonucleotides are enriched for modified oligonucleotides comprising such internucleoside linkage motifs.

[0323] In certain embodiments, modified nucleotides have an internucleoside linkage motif of sososssssssssosss, wherein each “s” represents a phosphorothioate internucleoside linkage and each “o” represents a phosphodiester internucleoside linkage. In certain embodiments, modified nucleotides have an internucleoside linkage motif of sooosssssssssooss, wherein each “s” represents a phosphorothioate internucleoside linkage and each “o” represents a phosphodiester internucleoside linkage. In certain embodiments, modified nucleotides have an internucleoside linkage motif of sooosssssssssooss, wherein each “s” represents a phosphorothioate internucleoside linkage and each “o” represents a phosphodiester internucleoside linkage. In certain embodiments, modified nucleotides have an internucleoside linkage motif of soossssssssssooss, wherein each “s” represents a phosphorothioate internucleoside linkage and each “o” represents a phosphodiester internucleoside linkage. In certain embodiments, modified nucleotides have an internucleoside linkage motif of soooossssssssssooss, wherein each “s” represents a phosphorothioate internucleoside linkage and each “o” represents a phosphodiester internucleoside linkage. In certain embodiments, modified nucleotides have an internucleoside linkage motif of sossssssssssssssoss, wherein each “s” represents a phosphorothioate internucleoside linkage and each “o” represents a phosphodiester internucleoside linkage. In certain embodiments, modified nucleotides have an internucleoside linkage motif of soossssssssssos, wherein each “s” represents a phosphorothioate internucleoside linkage and each “o” represents a phosphodiester internucleoside linkage. In certain embodiments, modified nucleotides have an internucleoside linkage motif of soosssssssssooss, wherein each “s” represents a phosphorothioate internucleoside linkage and each “o” represents a phosphodiester internucleoside linkage. In certain embodiments, modified nucleotides have an internucleoside linkage motif of sooosssssssssssooss, wherein each “s” represents a phosphorothioate internucleoside linkage and each “o” represents a phosphodiester internucleoside linkage. In certain embodiments, modified nucleotides have an internucleoside linkage motif of sooooossssssssssoss, wherein each “s” represents a phosphorothioate internucleoside linkage and each “o” represents a phosphodiester internucleoside linkage.

### Antisense RNAi Oligonucleotides

[0324] In certain embodiments, at least one linkage of the antisense RNAi oligonucleotide is a modified linkage. In certain embodiments, the 5′-most linkage (i.e., linking the first nucleoside from the 5′-end to the second nucleoside from the 5′-end) is modified. In certain embodiments, the two 5′-most linkages are modified. In certain embodiments, the first one or 2 linkages from the 3′-end are modified. In certain such embodiments, the modified linkage is a phosphorothioate linkage. In certain embodiments, the remaining linkages are all unmodified phosphodiester linkages. In certain embodiments, antisense RNAi oligonucleotides have an internucleoside linkage motif of ssooooooooooooooooooss, wherein each “s” represents a phosphorothioate internucleoside linkage and each “o” represents a phosphodiester internucleoside linkage.

[0325] In certain embodiments, at least one linkage of the antisense RNAi oligonucleotide is an inverted linkage.

### Sense RNAi Oligonucleotides

[0326] In certain embodiments, at least one linkage of the sense RNAi oligonucleotides is a modified linkage. In certain embodiments, the 5′-most linkage (i.e., linking the first nucleoside from the 5′-end to the second nucleoside from the 5′-end) is modified. In certain embodiments, the two 5′-most linkages are modified. In certain embodiments, the first one or 2 linkages from the 3′-end are modified. In certain such embodiments, the modified linkage is a phosphorothioate linkage. In certain embodiments, the remaining linkages are all unmodified phosphodiester linkages. In certain embodiments, sense RNAi oligonucleotides have an internucleoside linkage motif of ssooooooooooooooooss, wherein each “s” represents a phosphorothioate internucleoside linkage and each “o” represents a phosphodiester internucleoside linkage.

[0327] In certain embodiments, at least one linkage of the sense RNAi oligonucleotides is an inverted linkage.

[0328] C. Certain Lengths

[0329] It is possible to increase or decrease the length of an oligonucleotide without eliminating activity. For example, in Woolf et al. (Proc. Natl. Acad. Sci. USA 89:7305-7309, 1992), a series of oligonucleotides 13-25 nucleobases in length were tested for their ability to induce cleavage of a target RNA in an oocyte injection model. Oligonucleotides 25 nucleobases in length with 8 or 11 mismatch bases near the ends of the oligonucleotides were able to direct specific cleavage of the target RNA, albeit to a lesser extent than the oligonucleotides that contained no mismatches. Similarly, target specific cleavage was achieved using 13 nucleobase oligonucleotides, including those with 1 or 3 mismatches.

[0330] In certain embodiments, oligonucleotides (including modified oligonucleotides) can have any of a variety of ranges of lengths. In certain embodiments, oligonucleotides consist of X to Y linked nucleosides, where X represents the fewest number of nucleosides in the range and Y represents the largest number nucleosides in the range. In certain such embodiments, X and Y are each independently selected from 8, 9, 10, 11, 12, 13, 14, 15, 16, 17, 18, 19, 20, 21, 22, 23, 24, 25, 26, 27, 28, 29, 30, 31, 32, 33, 34, 35, 36, 37, 38, 39, 40, 41, 42, 43, 44, 45, 46, 47, 48, 49, and 50; provided that X<Y. For example, in certain embodiments, oligonucleotides consist of 12 to 13, 12 to 14, 12 to 15, 12 to 16, 12 to 17, 12 to 18, 12 to 19, 12 to 20, 12 to 21, 12 to 22, 12 to 23, 12 to 24, 12 to 25, 12 to 26, 12 to 27, 12 to 28, 12 to 29, 12 to 30, 13 to 14, 13 to 15, 13 to 16, 13 to 17, 13 to 18, 13 to 19, 13 to 20, 13 to 21, 13 to 22, 13 to 23, 13 to 24, 13 to 25, 13 to 26, 13 to 27, 13 to 28, 13 to 29, 13 to 30, 14 to 15, 14 to 16, 14 to 17, 14 to 18, 14 to 19, 14 to 20, 14 to 21, 14 to 22, 14 to 23, 14 to 24, 14 to 25, 14 to 26, 14 to 27, 14 to 28, 14 to 29, 14 to 30, 15 to 16, 15 to 17, 15 to 18, 15 to 19, 15 to 20, 15 to 21, 15 to 22, 15 to 23, 15 to 24, 15 to 25, 15 to 26, 15 to 27, 15 to 28, 15 to 29, 15 to 30, 16 to 17, 16 to 18, 16 to 19, 16 to 20, 16 to 21, 16 to 22, 16 to 23, 16 to 24, 16 to 25, 16 to 26, 16 to 27, 16 to 28, 16 to 29, 16 to 30, 17 to 18, 17 to 19, 17 to 20, 17 to 21, 17 to 22, 17 to 23, 17 to 24, 17 to 25, 17 to 26, 17 to 27, 17 to 28, 17 to 29, 17 to 30, 18 to 19, 18 to 20, 18 to 21, 18 to 22, 18 to 23, 18 to 24, 18 to 25, 18 to 26, 18 to 27, 18 to 28, 18 to 29, 18 to 30, 19 to 20, 19 to 21, 19 to 22, 19 to 23, 19 to 24, 19 to 25, 19 to 26, 19 to 29, 19 to 28, 19 to 29, 19 to 30, 20 to 21, 20 to 22, 20 to 23, 20 to 24, 20 to 25, 20 to 26, 20 to 27, 20 to 28, 20 to 29, 20 to 30, 21 to 22, 21 to 23, 21 to 24, 21 to 25, 21 to 26, 21 to 27, 21 to 28, 21 to 29, 21 to 30, 22 to 23, 22 to 24, 22 to 25, 22 to 26, 22 to 27, 22 to 28, 22 to 29, 22 to 30, 23 to 24, 23 to 25, 23 to 26, 23 to 27, 23 to 28, 23 to 29, 23 to 30, 24 to 25, 24 to 26, 24 to 27, 24 to 28, 24 to 29, 24 to 30, 25 to 26, 25 to 27, 25 to 28, 25 to 29, 25 to 30, 26 to 27, 26 to 28, 26 to 29, 26 to 30, 27 to 28, 27 to 29, 27 to 30, 28 to 29, 28 to 30, or 29 to 30 linked nucleosides.

### Antisense RNAi Oligonucleotides

[0331] In certain embodiments, antisense RNAi oligonucleotides consist of 17-30 linked nucleosides. In certain embodiments, antisense RNAi oligonucleotides consist of 17-25 linked nucleosides. In certain embodiments, antisense RNAi oligonucleotides consist of 17-23 linked nucleosides. In certain embodiments, antisense RNAi oligonucleotides consist of 17-21 linked nucleosides. In certain embodiments, antisense RNAi oligonucleotides consist of 18-30 linked nucleosides. In certain embodiments, antisense RNAi oligonucleotides consist of 20-30 linked nucleosides. In certain embodiments, antisense RNAi oligonucleotides consist of 21-30 linked nucleosides. In certain embodiments, antisense RNAi oligonucleotides consist of 23-30 linked nucleosides. In certain embodiments, antisense RNAi oligonucleotides consist of 18-25 linked nucleosides. In certain embodiments, antisense RNAi oligonucleotides consist of 20-22 linked nucleosides. In certain embodiments, antisense RNAi oligonucleotides consist of 21-23 linked nucleosides. In certain embodiments, antisense RNAi oligonucleotides consist of 23-24 linked nucleosides. In certain embodiments, antisense RNAi oligonucleotides consist of 20 linked nucleosides. In certain embodiments, antisense RNAi oligonucleotides consist of 21 linked nucleosides. In certain embodiments, antisense RNAi oligonucleotides consist of 22 linked nucleosides. In certain embodiments, antisense RNAi oligonucleotides consist of 23 linked nucleosides.

### Sense RNAi Oligonucleotides

[0332] In certain embodiments, sense RNAi oligonucleotides consist of 17-30 linked nucleosides. In certain embodiments, sense RNAi oligonucleotides consist of 17-25 linked nucleosides. In certain embodiments, sense RNAi oligonucleotides consist of 17-23 linked nucleosides. In certain embodiments, sense RNAi oligonucleotides consist of 17-21 linked nucleosides. In certain embodiments, sense RNAi oligonucleotides consist of 18-30 linked nucleosides. In certain embodiments, sense RNAi oligonucleotides consist of 20-30 linked nucleosides. In certain embodiments, sense RNAi oligonucleotides consist of 21-30 linked nucleosides. In certain embodiments, sense RNAi oligonucleotides consist of 23-30 linked nucleosides. In certain embodiments, sense RNAi oligonucleotides consist of 18-25 linked nucleosides. In certain embodiments, sense RNAi oligonucleotides consist of 20-22 linked nucleosides. In certain embodiments, sense RNAi oligonucleotides consist of 21-23 linked nucleosides. In certain embodiments, sense RNAi oligonucleotides consist of 23-24 linked nucleosides. In certain embodiments, sense RNAi oligonucleotides consist of 20 linked nucleosides. In certain embodiments, sense RNAi oligonucleotides consist of 21 linked nucleosides. In certain embodiments, sense RNAi oligonucleotides consist of 22 linked nucleosides. In certain embodiments, sense RNAi oligonucleotides consist of 23 linked nucleosides.

[0333] D. Certain Modified Oligonucleotides

[0334] In certain embodiments, the above modifications (sugar, nucleobase, internucleoside linkage) are incorporated into a modified oligonucleotide. In certain embodiments, modified oligonucleotides are characterized by their modification motifs and overall lengths. In certain embodiments, such parameters are each independent of one another. Thus, unless otherwise indicated, each internucleoside linkage of an oligonucleotide having a gapmer sugar motif may be modified or unmodified and may or may not follow the gapmer modification pattern of the sugar modifications. For example, the internucleoside linkages within the wing regions of a sugar gapmer may be the same or different from one another and may be the same or different from the internucleoside linkages of the gap region of the sugar motif. Likewise, such sugar gapmer oligonucleotides may comprise one or more modified nucleobase independent of the gapmer pattern of the sugar modifications. Unless otherwise indicated, all modifications are independent of nucleobase sequence.

[0335] E. Certain Populations of Modified Oligonucleotides

[0336] Populations of modified oligonucleotides in which all of the modified oligonucleotides of the population have the same molecular formula can be stereorandom populations or chirally enriched populations. All of the chiral centers of all of the modified oligonucleotides are stereorandom in a stereorandom population. In a chirally enriched population, at least one particular chiral center is not stereorandom in the modified oligonucleotides of the population. In certain embodiments, the modified oligonucleotides of a chirally enriched population are enriched for β-D ribosyl sugar moieties, and all of the phosphorothioate internucleoside linkages are stereorandom. In certain embodiments, the modified oligonucleotides of a chirally enriched population are enriched for both β-D ribosyl sugar moieties and at least one, particular phosphorothioate internucleoside linkage in a particular stereochemical configuration.

[0337] F. Nucleobase Sequence

[0338] In certain embodiments, oligonucleotides (unmodified or modified oligonucleotides) are further described by their nucleobase sequence. In certain embodiments oligonucleotides have a nucleobase sequence that is complementary to a second oligonucleotide or an identified reference nucleic acid, such as a target nucleic acid. In certain such embodiments, a region of an oligonucleotide has a nucleobase sequence that is complementary to a second oligonucleotide or an identified reference nucleic acid, such as a target nucleic acid. In certain embodiments, the nucleobase sequence of a region or entire length of an oligonucleotide is at least 50%, at least 60%, at least 70%, at least 80%, at least 85%, at least 90%, at least 95%, or 100% complementary to the second oligonucleotide or nucleic acid, such as a target nucleic acid.

[0339] II. Certain Oligomeric Compounds

[0340] In certain embodiments, provided herein are oligomeric compounds, which consist of an oligonucleotide (modified or unmodified) and optionally one or more conjugate groups and/or terminal groups. Conjugate groups consist of one or more conjugate moiety and a conjugate linker which links the conjugate moiety to the oligonucleotide. Conjugate groups may be attached to either or both ends of an oligonucleotide and/or at any internal position. In certain embodiments, conjugate groups are attached to the 2′-position of a nucleoside of a modified oligonucleotide. In certain embodiments, conjugate groups that are attached to either or both ends of an oligonucleotide are terminal groups. In certain such embodiments, conjugate groups or terminal groups are attached at the 3′ and/or 5′-end of oligonucleotides. In certain such embodiments, conjugate groups (or terminal groups) are attached at the 3′-end of oligonucleotides. In certain embodiments, conjugate groups are attached near the 3′-end of oligonucleotides. In certain embodiments, conjugate groups (or terminal groups) are attached at the 5′-end of oligonucleotides. In certain embodiments, conjugate groups are attached near the 5′-end of oligonucleotides.

[0341] Examples of terminal groups include but are not limited to conjugate groups, capping groups, phosphate moieties, protecting groups, modified or unmodified nucleosides, and two or more nucleosides that are independently modified or unmodified.

[0342] A. Certain RNAi Agents

[0343] RNAi agents comprise an antisense RNAi oligonucleotide and optionally a sense RNAi oligonucleotide. RNAi agents may also comprise terminal groups and/or conjugate groups which may be attached to the antisense RNAi oligonucleotide or the sense RNAi oligonucleotide (when present).

[0344] Duplexes

[0345] RNAi agents comprising an antisense RNAi oligonucleotide and a sense RNAi oligonucleotide form a duplex, because the sense RNAi oligonucleotide comprises an antisense-hybridizing region that is complementary to the antisense RNAi oligonucleotide. In certain embodiments, each nucleobase of the antisense RNAi oligonucleotide and the sense RNAi oligonucleotide are complementary to one another. In certain embodiments, the two RNAi oligonucleotides have at least one mismatch relative to one another.

[0346] In certain embodiments, the antisense hybridizing region constitutes the entire length of the sense RNAi oligonucleotide and the antisense RNAi oligonucleotide. In certain embodiments, one or both of the antisense RNAi oligonucleotide and the sense RNAi oligonucleotide comprise additional nucleosides at one or both ends that do not hybridize (overhanging nucleosides). In certain embodiments, overhanging nucleosides are DNA. In certain embodiments, overhanging nucleosides are linked to each other (where there is more than one) and to the first non-overhanging nucleoside with phosphorothioate linkages.

[0347] B. Certain Conjugate Groups

[0348] In certain embodiments, oligonucleotides are covalently attached to one or more conjugate groups. In certain embodiments, conjugate groups modify one or more properties of the attached oligonucleotide, including but not limited to pharmacodynamics, pharmacokinetics, stability, binding, absorption, tissue distribution, cellular distribution, cellular uptake, charge and clearance.

[0349] In certain embodiments, conjugation of one or more carbohydrate moieties to a modified oligonucleotide can optimize one or more properties of the modified oligonucleotide. In certain embodiments, the carbohydrate moiety is attached to a modified subunit of the modified oligonucleotide. For example, the ribose sugar of one or more ribonucleotide subunits of a modified oligonucleotide can be replaced with another moiety, e.g. a non-carbohydrate (preferably cyclic) carrier to which is attached a carbohydrate ligand. A ribonucleotide subunit in which the ribose sugar of the subunit has been so replaced is referred to herein as a ribose replacement modification subunit (RRMS), which is a modified sugar moiety. A cyclic carrier may be a carbocyclic ring system, i.e., one or more ring atoms may be a heteroatom, e.g., nitrogen, oxygen, sulphur. The cyclic carrier may be a monocyclic ring system, or may contain two or more rings, e.g. fused rings. The cyclic carrier may be a fully saturated ring system, or it may contain one or more double bonds. In certain embodiments, the modified oligonucleotide is a gapmer. In certain embodiments, the modified oligonucleotide is an antisense RNAi oligonucleotide. In certain embodiments, the modified oligonucleotide is a sense RNAi oligonucleotide.

[0350] In certain embodiments, conjugate groups impart a new property on the attached oligonucleotide, e.g., fluorophores or reporter groups that enable detection of the oligonucleotide. Certain conjugate groups and conjugate moieties have been described previously, for example: cholesterol moiety (Letsinger et al., Proc. Natl. Acad. Sci. USA, 1989, 86, 6553-6556), cholic acid (Manoharan et al., Bioorg. Med. Chem. Lett., 1994, 4, 1053-1060), a thioether, e.g., hexyl-S-tritylthiol (Manoharan et al., Ann. N.Y. Acad. Sci., 1992, 660, 306-309; Manoharan et al., Bioorg. Med. Chem. Lett., 1993, 3, 2765-2770), a thiocholesterol (Oberhauser et al., Nucl. Acids Res., 1992, 20, 533-538), an aliphatic chain, e.g., do-decan-diol or undecyl residues (Saison-Behmoaras et al., EMBO 1, 1991, 10, 1111-1118; Kabanov et al., FEBS Lett., 1990, 259, 327-330; Svinarchuk et al., Biochimie, 1993, 75, 49-54), a phospholipid, e.g., di-hexadecyl-rac-glycerol or triethyl-ammonium 1,2-di-O-hexadecyl-rac-glycero-3-H-phosphonate (Manoharan et al., Tetrahedron Lett., 1995, 36, 3651-3654; Shea et al., Nucl. Acids Res., 1990, 18, 3777-3783), a polyamine or a polyethylene glycol chain (Manoharan et al., Nucleosides & Nucleotides, 1995, 14, 969-973), or adamantane acetic acid a palmityl moiety (Mishra et al., Biochim. Biophys. Acta, 1995, 1264, 229-237), an octadecylamine or hexylamino-carbonyl-oxycholesterol moiety (Crooke et al., J. Pharmacol. Exp. Ther., 1996, 277, 923-937), a tocopherol group (Nishina et al., Molecular Therapy Nucleic Acids, 2015, 4, e220; and Nishina et al., Molecular Therapy, 2008, 16, 734-740), or a GalNAc cluster (e.g., WO2014/179620).

[0351] In certain embodiments, conjugate groups may be selected from any of a C22 alkyl, C20 alkyl, C16 alkyl, C10 alkyl, C21 alkyl, C19 alkyl, C18 alkyl, C15 alkyl, C14 alkyl, C13 alkyl, C12 alkyl, C11 alkyl, C9 alkyl, C8 alkyl, C7 alkyl, C6 alkyl, C5 alkyl, C22 alkenyl, C20 alkenyl, C16 alkenyl, C10 alkenyl, C21 alkenyl, C19 alkenyl, C18 alkenyl, C15 alkenyl, C14 alkenyl, C13 alkenyl, C12 alkenyl, C11 alkenyl, C9 alkenyl, C8 alkenyl, C7 alkenyl, C6 alkenyl, or C5 alkenyl.

[0352] In certain embodiments, conjugate groups may be selected from any of C22 alkyl, C20 alkyl, C16 alkyl, C10 alkyl, C21 alkyl, C19 alkyl, C18 alkyl, C15 alkyl, C14 alkyl, C13 alkyl, C12 alkyl, C11 alkyl, C9 alkyl, C8 alkyl, C7 alkyl, C6 alkyl, and C5 alkyl, where the alkyl chain has one or more unsaturated bonds.

[0353] In certain embodiments, a conjugate group is a lipid having the following structure:

[chemical structure]

[0354] In certain embodiments, a conjugate group is a lipid having the following structure:

[chemical structure]

which is also referred to herein as 3nC7-C16. “3nC7-C16” represents a palmitate moiety linked to a 3′-C7 amino modifier and is attached to the 3′-nucleoside of an RNAi oligonucleotide (e.g., the 3′-nucleoside of a sense oligonucleotide or the antisense oligonucleotide) via a phosphodiester linkage.

[0355] 1. Conjugate Moieties

[0356] Conjugate moieties include, without limitation, intercalators, reporter molecules, polyamines, polyamides, peptides, carbohydrates (e.g., GalNAc), vitamin moieties, polyethylene glycols, thioethers, polyethers, cholesterols, thiocholesterols, cholic acid moieties, folate, lipids, phospholipids, biotin, phenazine, phenanthridine, anthraquinone, adamantane, acridine, fluoresceins, rhodamines, coumarins, fluorophores, and dyes.

[0357] In certain embodiments, a conjugate moiety comprises an active drug substance, for example, aspirin, warfarin, phenylbutazone, ibuprofen, suprofen, fen-bufen, ketoprofen, (S)-(+)-pranoprofen, carprofen, dansylsarcosine, 2,3,5-triiodobenzoic acid, fingolimod, flufenamic acid, folinic acid, a benzothiadiazide, chlorothiazide, a diazepine, indo-methicin, a barbiturate, a cephalosporin, a sulfa drug, an antidiabetic, an antibacterial or an antibiotic.

[0358] 2. Conjugate Linkers

[0359] Conjugate moieties are attached to oligonucleotides through conjugate linkers. In certain oligomeric compounds, the conjugate linker is a single chemical bond (i.e., the conjugate moiety is attached directly to an oligonucleotide through a single bond). In certain embodiments, the conjugate linker comprises a chain structure, such as a hydrocarbyl chain, or an oligomer of repeating units such as ethylene glycol, nucleosides, or amino acid units.

[0360] In certain embodiments, a conjugate linker comprises pyrrolidine.

[0361] In certain embodiments, a conjugate linker comprises one or more groups selected from alkyl, amino, oxo, amide, disulfide, polyethylene glycol, ether, thioether, and hydroxylamino. In certain such embodiments, the conjugate linker comprises groups selected from alkyl, amino, oxo, amide and ether groups. In certain embodiments, the conjugate linker comprises groups selected from alkyl and amide groups. In certain embodiments, the conjugate linker comprises groups selected from alkyl and ether groups. In certain embodiments, the conjugate linker comprises at least one phosphorus moiety. In certain embodiments, the conjugate linker comprises at least one phosphate group. In certain embodiments, the conjugate linker includes at least one neutral linking group.

[0362] In certain embodiments, conjugate linkers, including the conjugate linkers described above, are bifunctional linking moieties, e.g., those known in the art to be useful for attaching conjugate groups to compounds, such as the oligonucleotides provided herein. In general, a bifunctional linking moiety comprises at least two functional groups. One of the functional groups is selected to bind to a particular site on a compound and the other is selected to bind to a conjugate group. Examples of functional groups used in a bifunctional linking moiety include but are not limited to electrophiles for reacting with nucleophilic groups and nucleophiles for reacting with electrophilic groups. In certain embodiments, bifunctional linking moieties comprise one or more groups selected from amino, hydroxyl, carboxylic acid, thiol, alkyl, alkenyl, and alkynyl.

[0363] Examples of conjugate linkers include but are not limited to pyrrolidine, 8-amino-3,6-dioxaoctanoic acid (ADO), succinimidyl 4-(N-maleimidomethyl) cyclohexane-1-carboxylate (SMCC) and 6-aminohexanoic acid (AHEX or AHA). Other conjugate linkers include but are not limited to substituted or unsubstituted C₁-C₁₀ alkyl, substituted or unsubstituted C₂-C₁₀ alkenyl or substituted or unsubstituted C₂-C₁₀ alkynyl, wherein a nonlimiting list of preferred substituent groups includes hydroxyl, amino, alkoxy, carboxy, benzyl, phenyl, nitro, thiol, thioalkoxy, halogen, alkyl, aryl, alkenyl and alkynyl.

[0364] In certain embodiments, conjugate linkers comprise 1-10 linker-nucleosides. In certain embodiments, conjugate linkers comprise 2-5 linker-nucleosides. In certain embodiments, conjugate linkers comprise exactly 3 linker-nucleosides. In certain embodiments, conjugate linkers comprise the TCA motif. In certain embodiments, such linker-nucleosides are modified nucleosides. In certain embodiments such linker-nucleosides comprise a modified sugar moiety. In certain embodiments, linker-nucleosides are unmodified. In certain embodiments, linker-nucleosides comprise an optionally protected heterocyclic base selected from a purine, substituted purine, pyrimidine or substituted pyrimidine. In certain embodiments, a cleavable moiety is a nucleoside selected from uracil, thymine, cytosine, 4-N-benzoylcytosine, 5-methyl cytosine, 4-N-benzoyl-5-methyl cytosine, adenine, 6-N-benzoyladenine, guanine and 2-N-isobutyrylguanine. It is typically desirable for linker-nucleosides to be cleaved from the oligomeric compound after it reaches a target tissue. Accordingly, linker-nucleosides are typically linked to one another and to the remainder of the oligomeric compound through cleavable bonds. In certain embodiments, such cleavable bonds are phosphodiester bonds.

[0365] Herein, linker-nucleosides are not considered to be part of the oligonucleotide. Accordingly, in embodiments in which an oligomeric compound comprises an oligonucleotide consisting of a specified number or range of linked nucleosides and/or a specified percent complementarity to a reference nucleic acid and the oligomeric compound also comprises a conjugate group comprising a conjugate linker comprising linker-nucleosides, those linker-nucleosides are not counted toward the length of the oligonucleotide and are not used in determining the percent complementarity of the oligonucleotide for the reference nucleic acid. For example, an oligomeric compound may comprise (1) a modified oligonucleotide consisting of 8-30 nucleosides and (2) a conjugate group comprising 1-10 linker-nucleosides that are contiguous with the nucleosides of the modified oligonucleotide. The total number of contiguous linked nucleosides in such an oligomeric compound is more than 30. Alternatively, an oligomeric compound may comprise a modified oligonucleotide consisting of 8-30 nucleosides and no conjugate group. The total number of contiguous linked nucleosides in such an oligomeric compound is no more than 30. Unless otherwise indicated conjugate linkers comprise no more than 10 linker-nucleosides. In certain embodiments, conjugate linkers comprise no more than 5 linker-nucleosides. In certain embodiments, conjugate linkers comprise no more than 3 linker-nucleosides. In certain embodiments, conjugate linkers comprise no more than 2 linker-nucleosides. In certain embodiments, conjugate linkers comprise no more than 1 linker-nucleoside.

[0366] In certain embodiments, it is desirable for a conjugate group to be cleaved from the oligonucleotide. For example, in certain circumstances oligomeric compounds comprising a particular conjugate moiety are better taken up by a particular cell type, but once the oligomeric compound has been taken up, it is desirable that the conjugate group be cleaved to release the unconjugated or parent oligonucleotide. Thus, certain conjugate linkers may comprise one or more cleavable moieties. In certain embodiments, a cleavable moiety is a cleavable bond. In certain embodiments, a cleavable moiety is a group of atoms comprising at least one cleavable bond. In certain embodiments, a cleavable moiety comprises a group of atoms having one, two, three, four, or more than four cleavable bonds. In certain embodiments, a cleavable moiety is selectively cleaved inside a cell or subcellular compartment, such as a lysosome. In certain embodiments, a cleavable moiety is selectively cleaved by endogenous enzymes, such as nucleases.

[0367] In certain embodiments, a cleavable bond is selected from among: an amide, an ester, an ether, one or both esters of a phosphodiester, a phosphate ester, a carbamate, or a disulfide. In certain embodiments, a cleavable bond is one or both of the esters of a phosphodiester. In certain embodiments, a cleavable moiety comprises a phosphate or phosphodiester. In certain embodiments, the cleavable moiety is a phosphate linkage between an oligonucleotide and a conjugate moiety or conjugate group.

[0368] In certain embodiments, a cleavable moiety comprises or consists of one or more linker-nucleosides. In certain such embodiments, the one or more linker-nucleosides are linked to one another and/or to the remainder of the oligomeric compound through cleavable bonds. In certain embodiments, such cleavable bonds are unmodified phosphodiester bonds. In certain embodiments, a cleavable moiety is 2′-deoxynucleoside that is attached to either the 3′ or 5′-terminal nucleoside of an oligonucleotide by a phosphodiester internucleoside linkage and covalently attached to the remainder of the conjugate linker or conjugate moiety by a phosphodiester or phosphorothioate linkage. In certain such embodiments, the cleavable moiety is 2′-deoxyadenosine.

[0369] 3. Cell-Targeting Moieties

[0370] In certain embodiments, a conjugate group comprises a cell-targeting moiety. In certain embodiments, a conjugate group has the general formula:

[chemical structure]

[0371] wherein n is from 1 to about 3, m is 0 when n is 1, m is 1 when n is 2 or greater, j is 1 or 0, and k is 1 or O.

[0372] In certain embodiments, n is 1, j is 1 and k is 0. In certain embodiments, n is 1, j is 0 and k is 1. In certain embodiments, n is 1, j is 1 and k is 1. In certain embodiments, n is 2, j is 1 and k is 0. In certain embodiments, n is 2, j is 0 and k is 1. In certain embodiments, n is 2, j is 1 and k is 1. In certain embodiments, n is 3, j is 1 and k is 0. In certain embodiments, n is 3, j is 0 and k is 1. In certain embodiments, n is 3, j is 1 and k is 1.

[0373] In certain embodiments, conjugate groups comprise cell-targeting moieties that have at least one tethered ligand. In certain embodiments, cell-targeting moieties comprise two tethered ligands covalently attached to a branching group. In certain embodiments, cell-targeting moieties comprise three tethered ligands covalently attached to a branching group.

[0374] In certain embodiments, each ligand of a cell-targeting moiety has an affinity for at least one type of receptor on a target cell. In certain embodiments, each ligand has an affinity for at least one type of receptor on the surface of a mammalian liver cell. In certain embodiments, each ligand has an affinity for the hepatic asialoglycoprotein receptor (ASGP-R). In certain embodiments, each ligand is a carbohydrate.

[0375] In certain embodiments, the cell-targeting moiety targets neurons. In certain embodiments, the cell-targeting moiety targets a neurotransmitter receptor. In certain embodiments, the cell targeting moiety targets a neurotransmitter transporter. In certain embodiments, the cell targeting moiety targets a GABA transporter. See e.g., WO 2011/131693, WO 2014/064257.

[0376] C. Certain Terminal Groups

[0377] In certain embodiments, oligomeric compounds comprise one or more terminal groups. In certain such embodiments, modified oligonucleotides comprise a phosphorus-containing group at the 5′-end of the modified oligonucleotide. In certain embodiments, the phosphorus-containing group is at the 5′-end of the antisense RNAi oligonucleotide and/or the sense RNAi oligonucleotide. In certain embodiments, the terminal group is a phosphate stabilized phosphate group. The 5′-end phosphorus-containing group can be 5′-end phosphate (5′-P), 5′-end phosphorothioate (5′-PS), 5′-end phosphorodithioate (5′-PS₂), 5′-end vinylphosphonate (5′-VP), 5′-end methylphosphonate (MePhos) or 5′-deoxy-5′-C-malonyl. When the 5′-end phosphorus-containing group is 5′-end vinylphosphonate, the 5′VP can be either 5′-E-VP isomer (i.e., trans-vinylphosphonate), 5′-Z-VP isomer (i.e., cis-vinylphosphonate), or mixtures thereof. Although such phosphate group can be attached to any modified oligonucleotide, it has particularly been shown that attachment of such a group to an antisense RNAi oligonucleotide improves activity of certain RNAi agents. See, e.g., Prakash et al., Nucleic Acids Res., 43(6):2993-3011, 2015; Elkayam, et al., Nucleic Acids Res., 45(6):3528-3536, 2017; Parmar, et al. ChemBioChem, 17(11)985-989; 2016; Harastzi, et al., Nucleic Acids Res., 45(13):7581-7592, 2017. In certain embodiments, the phosphate stabilizing group is 5′-cyclopropyl phosphonate. See e.g., WO/2018/027106.

[0378] In certain embodiments, terminal groups comprise one or more abasic nucleosides and/or inverted nucleosides. In certain embodiments, terminal groups comprise one or more 2′-linked nucleosides. In certain such embodiments, the 2′-linked nucleoside is an abasic nucleoside.

[0379] D. Certain Specific RNAi Motifs

[0380] RNAi agents can be described by motif or by specific features.

[0381] In certain embodiments, the RNAi agents described herein comprise:
[0382] (a) a sense RNAi oligonucleotide having:
   [0383] (i) a length of 21 nucleotides;
   [0384] (ii) a conjugate attached to the 3′-end; and
   [0385] (iii) 2′-F modifications at positions 1, 3, 5, 7, 9 to 11, 13, 17, 19, and 21, and 2′-OMe modifications at positions 2, 4, 6, 8, 12, 14 to 16, 18, and 20 (counting from the 5′ end);
[0386] and
[0387] (b) an antisense RNAi oligonucleotide having:
   [0388] (i) a length of 23 nucleotides;
   [0389] (ii) 2′-OMe modifications at positions 1, 3, 5, 9, 11 to 13, 15, 17, 19, 21, and 23, and 2′F modifications at positions 2, 4, 6 to 8, 10, 14, 16, 18, 20, and 22 (counting from the 5′ end); and
   [0390] (iii) phosphorothioate internucleoside linkages between nucleoside positions 21 and 22, and between nucleoside positions 22 and 23 (counting from the 5′ end);
   [0391] wherein the two nucleotides at the 3′end of the antisense RNAi oligonucleotide are overhanging nucleosides, and the end of the RNAi agent duplex constituting the 5′-end of the antisense RNAi oligonucleotide and the 3′-end of the sense RNAi oligonucleotide is blunt (i.e., neither oligonucleotide has overhang nucleoside at that end and instead the hybridizing region of the sense RNAi oligonucleotide includes the 3′-most nucleoside of the sense RNAi oligonucleotide and that nucleoside hybridizes with the 5′-most nucleoside of the antisense oligonucleotide).

[0392] In certain embodiments, the RNAi agents described herein comprise:
[0393] (a) a sense RNAi oligonucleotide having:
   [0394] (i) a length of 21 nucleotides;
   [0395] (ii) a conjugate attached to the 3′-end;
   [0396] (iii) 2′-F modifications at positions 1, 3, 5, 7, 9 to 11, 13, 17, 19, and 21, and 2′-OMe modifications at positions 2, 4, 6, 8, 12, 14, 16, 18, and 20 (counting from the 5′ end); and
   [0397] (iv) phosphorothioate internucleoside linkages between nucleoside positions 1 and 2, and between nucleoside positions 2 and 3 (counting from the 5′ end);
[0398] and
[0399] (b) an antisense RNAi oligonucleotide having:
   [0400] (i) a length of 23 nucleotides;
   [0401] (ii) 2′-OMe modifications at positions 1, 3, 5, 7, 9, 11 to 13, 15, 17, 19, and 21 to 23, and 2′F modifications at positions 2, 4, 6, 8, 10, 14, 16, 18, and 20 (counting from the 5′ end); and
   [0402] (iii) phosphorothioate internucleoside linkages between nucleoside positions 1 and 2, between nucleoside positions 2 and 3, between nucleoside positions 21 and 22, and between nucleoside positions 22 and 23 (counting from the 5′ end);
   [0403] wherein the RNAi duplex includes a two nucleotide overhang at the 3′end of the antisense RNAi oligonucleotide, and a blunt end at the 5′-end of the antisense RNAi oligonucleotide.

[0404] In certain embodiments, the RNAi agents described herein comprise:
[0405] (a) a sense RNAi oligonucleotide having:
   [0406] (i) a length of 21 nucleotides;
   [0407] (ii) a conjugate attached to the 3′-end;
   [0408] (iii) 2′-OMe modifications at positions 1 to 6, 8, 10, and 12 to 21, and 2′-F modifications at positions 7 and 9, and a deoxynucleotide at position 11 (counting from the 5′ end); and
   [0409] (iv) phosphorothioate internucleoside linkages between nucleoside positions 1 and 2, and between nucleoside positions 2 and 3 (counting from the 5′ end);
[0410] and
[0411] (b) an antisense RNAi oligonucleotide having:
   [0412] (i) a length of 23 nucleotides;
   [0413] (ii) 2′-OMe modifications at positions 1, 3, 7, 9, 11, 13, 15, 17, and 19 to 23, and 2′F modifications at positions 2, 4 to 6, 8, 10, 12, 14, 16, and 18 (counting from the 5′ end); and
   [0414] (iii) phosphorothioate internucleoside linkages between nucleoside positions 1 and 2, between nucleoside positions 2 and 3, between nucleoside positions 21 and 22, and between nucleoside positions 22 and 23 (counting from the 5′ end);
   [0415] wherein the RNAi duplex has a two nucleotide overhang at the 3′end of the antisense RNAi oligonucleotide, and a blunt end at the 5′-end of the antisense RNAi oligonucleotide.

[0416] In certain embodiments, the RNAi agents described herein comprise:
[0417] (a) a sense RNAi oligonucleotide having:
   [0418] (i) a length of 21 nucleotides;
   [0419] (ii) a conjugate attached to the 3′-end;
   [0420] (iii) 2′-OMe modifications at positions 1 to 6, 8, and 12 to 21, and 2′-F modifications at positions 7, and 9 to 11; and
   [0421] (iv) phosphorothioate internucleoside linkages between nucleoside positions 1 and 2, and between nucleoside positions 2 and 3 (counting from the 5′ end);
[0422] and
[0423] (b) an antisense RNAi oligonucleotide having:
   [0424] (i) a length of 23 nucleotides;
   [0425] (ii) 2′-OMe modifications at positions 1, 3 to 5, 7, 8, 10 to 13, 15, and 17 to 23, and 2′F modifications at positions 2, 6, 9, 14, and 16 (counting from the 5′ end); and
   [0426] (iii) phosphorothioate internucleoside linkages between nucleoside positions 1 and 2, between nucleoside positions 2 and 3, between nucleoside positions 21 and 22, and between nucleoside positions 22 and 23 (counting from the 5′ end);
   [0427] wherein the RNAi duplex has a two nucleotide overhang at the 3′end of the antisense RNAi oligonucleotide, and a blunt end at the 5′-end of the antisense RNAi oligonucleotide.

[0428] In certain embodiments, the RNAi agents described herein comprise:
[0429] (a) a sense RNAi oligonucleotide having:
   [0430] (i) a length of 21 nucleotides;
   [0431] (ii) a conjugate attached to the 3′-end;
   [0432] (iii) 2′-OMe modifications at positions 1 to 6, 8, and 12 to 21, and 2′-F modifications at positions 7, and 9 to 11; and
   [0433] (iv) phosphorothioate internucleoside linkages between nucleoside positions 1 and 2, and between nucleoside positions 2 and 3 (counting from the 5′ end);
[0434] and
[0435] (b) an antisense RNAi oligonucleotide having:
   [0436] (i) a length of 23 nucleotides;
   [0437] (ii) 2′-OMe modifications at positions 1, 3 to 5, 7, 10 to 13, 15, and 17 to 23, and 2′F modifications at positions 2, 6, 8, 9, 14, and 16 (counting from the 5′ end); and
   [0438] (iii) phosphorothioate internucleoside linkages between nucleoside positions 1 and 2, between nucleoside positions 2 and 3, between nucleoside positions 21 and 22, and between nucleoside positions 22 and 23 (counting from the 5′ end);
   [0439] wherein the RNAi duplex has a two nucleotide overhang at the 3′end of the antisense RNAi oligonucleotide, and a blunt end at the 5′-end of the antisense RNAi oligonucleotide.

[0440] In certain embodiments, the RNAi agents described herein comprise:
[0441] (a) a sense RNAi oligonucleotide having:
   [0442] (i) a length of 19 nucleotides;
   [0443] (ii) a conjugate attached to the 3′-end;
   [0444] (iii) 2′-OMe modifications at positions 1 to 4, 6, and 10 to 19, and 2′-F modifications at positions 5, and 7 to 9; and
   [0445] (iv) phosphorothioate internucleoside linkages between nucleoside positions 1 and 2, and between nucleoside positions 2 and 3 (counting from the 5′ end);
[0446] and
[0447] (b) an antisense RNAi oligonucleotide having:
   [0448] (i) a length of 21 nucleotides;
   [0449] (ii) 2′-OMe modifications at positions 1, 3 to 5, 7, 10 to 13, 15, and 17 to 21, and 2′F modifications at positions 2, 6, 8, 9, 14, and 16 (counting from the 5′ end); and
   [0450] (iii) phosphorothioate internucleoside linkages between nucleoside positions 1 and 2, between nucleoside positions 2 and 3, between nucleoside positions 19 and 20, and between nucleoside positions 20 and 21 (counting from the 5′ end);
   [0451] wherein the RNAi duplex has a two nucleotide overhang at the 3′end of the antisense RNAi oligonucleotide, and a blunt end at the 5′-end of the antisense RNAi oligonucleotide.

[0452] In certain embodiments, the RNAi agents described herein comprise:
[0453] (a) a sense RNAi oligonucleotide having:
   [0454] (i) a length of 21 nucleotides;
   [0455] (ii) a conjugate attached at position 6 (counting from the 5′ end);
   [0456] (iii) 2′-F modifications at positions 7 and 9 to 11, and 2′-OMe modifications at positions 1 to 5, 8, and 12 to 21 (counting from the 5′ end); and
   [0457] (iv) phosphorothioate internucleoside linkages between nucleoside positions 1 and 2, between nucleoside positions 2 and 3, between nucleoside positions 19 and 20, and between nucleoside positions 20 and 21 (counting from the 5′ end);
[0458] and
[0459] (b) an antisense RNAi oligonucleotide having:
   [0460] (i) a length of 23 nucleotides;
   [0461] (ii) 2′-OMe modifications at positions 1, 3 to 5, 7, 10 to 13, 15, and 17 to 23, and 2′F modifications at positions 2, 6, 8, 9, 14, and 16 (counting from the 5′ end);
   [0462] (iii) phosphorothioate internucleoside linkages between nucleoside positions 1 and 2, between nucleoside positions 2 and 3, between nucleoside positions 21 and 22, and between nucleoside positions 22 and 23 (counting from the 5′ end); and
   [0463] (iv) a stabilized phosphate group attached to the 5′ position of the 5′-most nucleoside;
   [0464] wherein the RNAi duplex includes a two nucleotide overhang at the 3′end of the antisense RNAi oligonucleotide, and a blunt end at the 5′-end of the antisense RNAi oligonucleotide.

[0465] In certain embodiments, the RNAi agents described herein comprise:
[0466] (a) a sense RNAi oligonucleotide having:
   [0467] (i) a length of 21 nucleotides;
   [0468] (ii) a conjugate attached to the 3′-end;
   [0469] (iii) 2′-F modifications at positions 7 and 9 to 11, and 2′-OMe modifications at positions 1 to 6, 8, and 12 to 21 (counting from the 5′ end);
   [0470] (iv) phosphorothioate internucleoside linkages between nucleoside positions 1 and 2 and between nucleoside positions 2 and 3 (counting from the 5′ end);
[0471] and
[0472] (b) an antisense RNAi oligonucleotide having:
   [0473] (i) a length of 23 nucleotides;
   [0474] (ii) 2′-OMe modifications at positions 1, 3 to 5, 7 to 13, 15, and 17 to 23 an (S)-GNA modification at position 6, and 2′F modifications at positions 2, 14, and 16 (counting from the 5′ end); and
   [0475] (iii) phosphorothioate internucleoside linkages between nucleoside positions 1 and 2, between nucleoside positions 2 and 3, between nucleoside positions 21 and 22, and between nucleoside positions 22 and 23 (counting from the 5′ end);
   [0476] wherein the RNAi duplex includes a two nucleotide overhang at the 3′end of the antisense RNAi oligonucleotide, and a blunt end at the 5′-end of the antisense RNAi oligonucleotide.

[0477] In certain embodiments, the RNAi agents described herein comprise:
[0478] (a) a sense RNAi oligonucleotide having:
   [0479] (i) a length of 21 nucleotides;
   [0480] (ii) a conjugate attached to the 3′-end;
   [0481] (iii) 2′-F modifications at positions 7 and 9 to 11, and 2′-OMe modifications at positions 1 to 6, 8, and 12 to 21 (counting from the 5′ end);
   [0482] (iv) phosphorothioate internucleoside linkages between nucleoside positions 1 and 2 and between nucleoside positions 2 and 3 (counting from the 5′ end);
[0483] and
[0484] (b) an antisense RNAi oligonucleotide having:
   [0485] (i) a length of 23 nucleotides;
   [0486] (ii) 2′-OMe modifications at positions 1, 3 to 6, 8 to 13, 15, and 17 to 23 an (S)-GNA modification at position 7, and 2′F modifications at positions 2, 14, and 16 (counting from the 5′ end); and
   [0487] (iii) phosphorothioate internucleoside linkages between nucleoside positions 1 and 2, between nucleoside positions 2 and 3, between nucleoside positions 21 and 22, and between nucleoside positions 22 and 23 (counting from the 5′ end);
   [0488] wherein the RNAi duplex includes a two nucleotide overhang at the 3′end of the antisense RNAi oligonucleotide, and a blunt end at the 5′-end of the antisense RNAi oligonucleotide.

[0489] In certain embodiments, the RNAi agents described herein comprise:
[0490] (a) a sense RNAi oligonucleotide having:
   [0491] (i) a length of 21 nucleotides;
   [0492] (ii) a conjugate attached at position 6 (counting from the 5′ end); and
   [0493] (iii) 2′-F modifications at positions 7 and 9 to 11, and 2′-OMe modifications at positions 1 to 5, 8, and 12 to 21 (counting from the 5′ end);
   [0494] (iv) phosphorothioate internucleoside linkages between nucleoside positions 1 and 2, between nucleoside positions 2 and 3, between nucleoside positions 19 and 20, and between nucleoside positions 20 and 21 (counting from the 5′ end);
[0495] and
[0496] (b) an antisense RNAi oligonucleotide having:
   [0497] (i) a length of 23 nucleotides;
   [0498] (ii) 2′-OMe modifications at positions 1, 3 to 5, 7 to 13, 15, and 17 to 23 an (S)-GNA modification at position 6, and 2′F modifications at positions 2, 14, and 16 (counting from the 5′ end);
   [0499] (iii) phosphorothioate internucleoside linkages between nucleoside positions 1 and 2, between nucleoside positions 2 and 3, between nucleoside positions 21 and 22, and between nucleoside positions 22 and 23 (counting from the 5′ end); and
   [0500] (iv) a stabilized phosphate group attached to the 5′ position of the 5′-most nucleoside;
   [0501] wherein the RNAi duplex includes a two nucleotide overhang at the 3′end of the antisense RNAi oligonucleotide, and a blunt end at the 5′-end of the antisense RNAi oligonucleotide.

[0502] In certain embodiments, the RNAi agents described herein comprise:
[0503] (a) a sense RNAi oligonucleotide having:
   [0504] (i) a length of 21 nucleotides;
   [0505] (ii) a conjugate attached at position 6 (counting from the 5′ end);
   [0506] (iii) 2′-F modifications at positions 7 and 9 to 11, and 2′-OMe modifications at positions 1 to 5, 8, and 12 to 21 (counting from the 5′ end); and
   [0507] (iv) phosphorothioate internucleoside linkages between nucleoside positions 1 and 2, between nucleoside positions 2 and 3, between nucleoside positions 19 and 20, and between nucleoside positions 20 and 21 (counting from the 5′ end);
[0508] and
[0509] (b) an antisense RNAi oligonucleotide having:
   [0510] (i) a length of 23 nucleotides;
   [0511] (ii) 2′-OMe modifications at positions 1, 3 to 6, 8 to 13, 15, and 17 to 23 an (S)-GNA modification at position 7, and 2′F modifications at positions 2, 14, and 16 (counting from the 5′ end);
   [0512] (iii) phosphorothioate internucleoside linkages between nucleoside positions 1 and 2, between nucleoside positions 2 and 3, between nucleoside positions 21 and 22, and between nucleoside positions 22 and 23 (counting from the 5′ end); and
   [0513] (iv) a stabilized phosphate group attached to the 5′ position of the 5′-most nucleoside;
   [0514] wherein the two nucleotides at the 3′end of the antisense RNAi oligonucleotide are overhanging nucleosides, and the end of the RNAi agent duplex constituting the 5′-end of the antisense RNAi oligonucleotide and the 3′-end of the sense RNAi oligonucleotide is blunt (i.e., neither oligonucleotide has overhang nucleoside at that end and instead the hybridizing region of the sense RNAi oligonucleotide includes the 3′-most nucleoside of the sense RNAi oligonucleotide and that nucleoside hybridizes with the 5′-most nucleoside of the antisense oligonucleotide).

[0515] In certain embodiments, the RNAi agents described herein comprise:
[0516] (a) a sense RNAi oligonucleotide having:
   [0517] (i) a length of 21 nucleotides;
   [0518] (ii) a conjugate attached to the 5′-end;
   [0519] (iii) 2′-OMe modifications at positions 1 to 8, and 12 to 21, and 2′-F modifications at positions 9 to 11; and
   [0520] (iv) inverted abasic sugar moieties attached to both the 5′-most and 3′-most nucleosides;
[0521] and
[0522] (b) an antisense RNAi oligonucleotide having:
   [0523] (i) a length of 21 nucleotides;
   [0524] (ii) 2′-OMe modifications at positions 1, 3, 5, 7, 9, 11, 13, 15, 17, 19, and 21, and 2′F modifications at positions 2, 4, 6, 8, 10, 12, 14, 16, 18, and 20 (counting from the 5′ end); and
   [0525] (iii) phosphorothioate internucleoside linkages between nucleoside positions 1 and 2, between nucleoside positions 2 and 3, between nucleoside positions 3 and 4, and between nucleoside positions 20 and 21 (counting from the 5′ end).

[0526] In certain embodiments, the RNAi agents described herein comprise:
[0527] (a) a sense RNAi oligonucleotide having:
   [0528] (i) a length of 21 nucleotides;
   [0529] (ii) a conjugate attached to the 5′-end;
   [0530] (iii) 2′-OMe modifications at positions 1 to 8, and 12 to 21, and 2′-F modifications at positions 9 to 11;
   [0531] (iv) a phosphorothioate internucleoside linkage between nucleoside positions 1 and 2 (counting from the 5′ end); and
   [0532] (v) an inverted abasic sugar moiety attached to the 3′-most nucleoside;
[0533] and
[0534] (b) an antisense RNAi oligonucleotide having:
   [0535] (i) a length of 21 nucleotides;
   [0536] (ii) 2′-OMe modifications at positions 1, 3, 5, 7, 9, 11, 13, 15, 17, 19, and 21, and 2′F modifications at positions 2, 4, 6, 8, 10, 12, 14, 16, 18, and 20 (counting from the 5′ end); and
   [0537] (iii) phosphorothioate internucleoside linkages between nucleoside positions 1 and 2, between nucleoside positions 2 and 3, between nucleoside positions 3 and 4, and between nucleoside positions 20 and 21 (counting from the 5′ end).

[0538] In certain embodiments, the RNAi agents described herein comprise:
[0539] (a) a sense RNAi oligonucleotide having:
   [0540] (i) a length of 19 nucleotides;
   [0541] (ii) a conjugate attached to the 5′-end;
   [0542] (iii) 2′-OMe modifications at positions 2, 4, 6, 8, 10, 12, 14, 16, 18, and 20, and 2′-F modifications at positions 1, 3, 5, 7, 9, 11, 13, 15, 17, 19, and 21; and
   [0543] (iv) phosphorothioate internucleoside linkages between nucleoside positions 17 and 18, and between nucleoside positions 18 and 19 (counting from the 5′ end);
[0544] and
[0545] (b) an antisense RNAi oligonucleotide having:
   [0546] (i) a length of 19 nucleotides;
   [0547] (ii) 2′-OMe modifications at positions 1, 3, 5, 7, 9, 11, 13, 15, 17, 19, and 21, and 2′F modifications at positions 2, 4, 6, 8, 10, 12, 14, 16, 18, and 20 (counting from the 5′ end); and
   [0548] (iii) phosphorothioate internucleoside linkages between nucleoside positions 1 and 2, between nucleoside positions 2 and 3, between nucleoside positions 17 and 18, and between nucleoside positions 18 and 19 (counting from the 5′ end).

[0549] In any of the above embodiments, the conjugate at the 3′-end of the sense RNAi oligonucleotide may comprise a targeting moiety. In certain embodiments, the targeting moiety targets a neurotransmitter receptor. In certain embodiments, the cell targeting moiety targets a neurotransmitter transporter. In certain embodiments, the cell targeting moiety targets a GABA transporter. See e.g., WO 2011/131693, WO 2014/064257.

[0550] In certain embodiments, the RNAi agent comprises a 21 nucleotide sense RNAi oligonucleotide and a 23 nucleotide antisense RNAi oligonucleotide, wherein the sense RNAi oligonucleotide contains at least one motif of three contiguous 2′-F modified nucleosides at positions 9, 10, 11 from the 5′-end; the antisense RNAi oligonucleotide contains at least one motif of three 2′-O-methyl modifications on three consecutive nucleotides at positions 11, 12, 13 from the 5′ end, wherein one end of the RNAi agent is blunt, while the other end comprises a 2 nucleotide overhang. Preferably, the 2 nucleotide overhang is at the 3′-end of the antisense RNAi oligonucleotide.

[0551] In certain embodiments, when the 2 nucleotide overhang is at the 3′-end of the antisense RNAi oligonucleotide, there may be two phosphorothioate internucleoside linkages between the terminal three nucleotides, wherein two of the three nucleotides are the overhang nucleotides, and the third nucleotide is a paired nucleotide next to the overhang nucleotide. In certain embodiments, the RNAi agent additionally has two phosphorothioate internucleoside linkages between the terminal three nucleotides at both the 5′-end of the sense RNAi oligonucleotide and at the 5′-end of the antisense RNAi oligonucleotide. In certain embodiments, every nucleotide in the sense RNAi oligonucleotide and the antisense RNAi oligonucleotide of the RNAi agent is a modified nucleotide. In certain embodiments, each nucleotide is independently modified with a 2′-O-methyl or 3′-fluoro, e.g. in an alternating motif. Optionally, the RNAi agent comprises a conjugate.

[0552] In certain embodiments, every nucleotide in the sense RNAi oligonucleotide and antisense RNAi oligonucleotide of the RNAi agent, including the nucleotides that are part of the motifs, may be modified. Each nucleotide may be modified with the same or different modification, which can include one or more alteration of one or both of the non-linking phosphate oxygens; alteration of a constituent of the ribose sugar, e.g., of the 2′ hydroxyl on the ribose sugar; wholesale replacement of the phosphate moiety with “dephospho” linkers; modification or replacement of a naturally occurring base; and replacement or modification of the ribose-phosphate backbone.

[0553] In certain embodiments, each nucleoside of the sense RNAi oligonucleotide and antisense RNAi oligonucleotide is independently modified with LNA, cEt, UNA, HNA, CeNA, 2′-MOE, 2′-OMe, 2′-O-allyl, 2′-C-allyl, 2′-deoxy, 2′-hydroxyl, or 2′-fluoro. The RNAi agent can contain more than one modification. In certain embodiments, each nucleoside of the sense RNAi oligonucleotide and antisense RNAi oligonucleotide is independently modified with 2′-O-methyl or 2′-F. In certain embodiments, the modification is a 2′-NMA modification.

[0554] The term “alternating motif” as used herein refers to a motif having one or more modifications, each modification occurring on alternating nucleotides of one RNAi oligonucleotide. The alternating nucleotide may refer to one per every other nucleotide or one per every three nucleotides, or a similar pattern. For example, if A, B and C each represent one type of modification to the nucleotide, the alternating motif can be “ABABABABABAB . . . ,” “AABBAABBAABB . . . ,” “AABAABAABAAB . . . ,” “AAABAAABAAAB . . . ,” “AAABBBAAABBB . . . ,” or “ABCABCABCABC . . . ,” etc.

[0555] The type of modifications contained in the alternating motif may be the same or different. For example, if A, B, C, D each represent one type of modification on the nucleotide, the alternating pattern, i.e., modifications on every other nucleotide, may be the same, but each of the sense RNAi oligonucleotide or antisense RNAi oligonucleotide can be selected from several possibilities of modifications within the alternating motif such as “ABABAB . . . ”, “ACACAC . . . ” “BDBDBD . . . ” or “CDCDCD . . . ,” etc.

[0556] In certain embodiments, the modification pattern for the alternating motif on the sense RNAi oligonucleotide relative to the modification pattern for the alternating motif on the antisense RNAi oligonucleotide is shifted. The shift may be such that the group of modified nucleotides of the sense RNAi oligonucleotide corresponds to a group of differently modified nucleotides of the antisense RNAi oligonucleotide and vice versa. For example, the sense RNAi oligonucleotide when paired with the antisense RNAi oligonucleotide in the RNAi duplex, the alternating motif in the sense RNAi oligonucleotide may start with “ABABAB” from 5′-3′ of the RNAi oligonucleotide and the alternating motif in the antisense RNAi oligonucleotide may start with “BABABA” from 5′-3 ‘of the RNAi oligonucleotide within the duplex region. As another example, the alternating motif in the sense RNAi oligonucleotide may start with “AABBAABB” from 5’-3′ of the RNAi oligonucleotide and the alternating motif in the antisense RNAi oligonucleotide may start with “BBAABBAA” from 5′-3′ of the RNAi oligonucleotide within the duplex region, so that there is a complete or partial shift of the modification 10 patterns between the sense RNAi oligonucleotide and the antisense RNAi oligonucleotide.

[0557] In certain embodiments, the RNAi agent comprising the pattern of the alternating motif of 2′-O-methyl modification and 2′-F modification on the sense RNAi oligonucleotide initially has a shift relative to the pattern of the alternating motif of 2′-O-methyl modification and 2′-F modification on the antisense RNAi oligonucleotide initially, i.e., the 2′-O-methyl modified nucleotide on the sense RNAi oligonucleotide base pairs with a 2′-F modified nucleotides on the antisense RNAi oligonucleotide and vice versa. The 1 position of the sense RNAi oligonucleotide may start with the 2′-F modification, and the 1 position of the antisense RNAi oligonucleotide may start with a 2′-O-methyl modification.

[0558] The introduction of one or more motifs of three identical modifications on three consecutive nucleotides to the sense RNAi oligonucleotide and/or antisense RNAi oligonucleotide interrupts the initial modification pattern present in the sense RNAi oligonucleotide and/or antisense RNAi oligonucleotide. This interruption of the modification pattern of the sense and/or antisense RNAi oligonucleotide by introducing one or more motifs of three identical modifications on three consecutive nucleotides to the sense and/or antisense RNAi oligonucleotide surprisingly enhances the gene silencing activity to the target gene. In one embodiment, when the motif of three identical modifications on three consecutive 25 nucleotides is introduced to any of the RNAi oligonucleotide s, the modification of the nucleotide next to the motif is a different modification than the modification of the motif. For example, the portion of the sequence containing the motif is “ . . . NaYYYNb . . . ,” where “Y” represents the modification of the motif of three identical modifications on three consecutive nucleotide, and “Na” and “Nb” represent a modification to the nucleotide next to the motif “YYY” that is different than the modification of Y, and where Na and Nb can be the same or different modifications. Alternatively, Na and/or Nb may be present or absent when there is a wing modification present.

[0559] In certain embodiments, the sense RNAi oligonucleotide may be represented by formula (I):

5′nₚ-Nₐ—(XXX)i-N_{b}—YYY—N_{b}—(ZZZ)ᵣNₐ-n_{q}3′ (I)
[0560] wherein:
[0561] i and j are each independently 0 or 1;
[0562] p and q are each independently 0-6;
[0563] each Nₐ independently represents 0-25 linked nucleosides comprising at least two differently modified nucleosides;
[0564] each N_{b} independently represents 0-10 linked nucleosides;
[0565] each nₚ and n_{q} independently represent an overhanging nucleoside;
[0566] wherein N_{b} and Y do not have the same modification; and
[0567] XXX, YYY, and ZZZ each independently represent modified nucleosides where each X nucleoside has the same modification; each Y nucleoside has the same modification; and each Z nucleoside has the same modification. In certain embodiments, each Y comprises a 2′-F modification.

[0568] In certain embodiments, the Nₐ and N_{b} comprise modifications of alternating patterns.

[0569] In certain embodiments, the YYY motif occurs at or near the cleavage site of the target nucleic acid. For example, when the RNAi agent has a duplex region of 17-23 nucleotides in length, the YYY motif can occur at or near the vicinity of the cleavage site (e.g., can occur at positions 6, 7, 8; 7, 8, 9; 8, 9, 10; 9, 10, 11; 10, 11, 12; or 11, 12, 13) of the sense RNAi oligonucleotide, the count starting from the 1^{st} nucleotide from the 5′-end; or optionally, the count starting at the 1^{st} paired nucleotide within the duplex region, from the 5′-end.

[0570] In certain embodiments, the antisense RNAi oligonucleotide of the RNAi may be represented by the formula:

5′n_{q}-Nₐ′—(Z′Z′Z′)ₖ—N_{b}′—Y′Y′Y′—N_{b}′—(X′X′X′)ₗ—N′ₐ-nₚ3′ (II)
[0571] wherein:
[0572] k and l are each independently 0 or 1;
[0573] p′ and q′ are each independently 0-6;
[0574] each Nₐ′ independently represents 0-25 linked nucleotides comprising at least two differently modified nucleotides;
[0575] each N_{b}′ independently represents 0-10 linked nucleotides;
[0576] each nₚ′ and n_{q}′ independently represent an overhanging nucleoside;
[0577] wherein N_{b}′ and Y′ do not have the same modification; and
[0578] X′X′X′, Y′Y′Y′, and Z′Z′Z′ each independently represent modified nucleosides where each X′ nucleoside has the same modification; each Y′ nucleoside has the same modification; and each Z′ nucleoside has the same modification. In certain embodiments, each Y′ comprises a 2′-F modification. In certain embodiments, each Y′ comprises a 2′-OMe modification.

[0579] In certain embodiments, the Nₐ′ and/or N_{b}′ comprise modifications of alternating patterns.

[0580] In certain embodiments, the Y′Y′Y′ motif occurs at or near the cleavage site of the target nucleic acid. For example, when the RNAi agent has a duplex region of 17-23 nucleotides in length, the Y′Y′Y′ motif can occur at positions 9, 10, 11; 10, 11, 12; 11, 12, 13; 12, 13, 14; or 13, 14, 15 of the antisense RNAi oligonucleotide, with the count starting from the 1^{st} nucleotide from the 5′-end; or, optionally, the count starting at the 1^{st} paired nucleotide within the duplex region, from the 5′-end. Preferably, the Y′Y′Y′ motif occurs at positions 11, 12, 13.

[0581] In certain embodiments, k is 1 and l is 0, or k is 0 and l is 1, or both k and l are 1.

[0582] The antisense RNAi oligonucleotide can therefore be represented by the following formulas:

5′n_{q}′—Nₐ′—Z′Z′Z′—N_{b}′—Y′Y′Y′—Nₐ′-nₚ′3′ (IIb);

5′n_{q}′—Nₐ′—Y′Y′Y′—N_{b}′—X′X′X′-nₚ′3′ (IIc); or

5′n_{q}′—Nₐ′—Z′Z′Z′—N_{b}′—Y′Y′Y′—N_{b}′—X′X′X′—Nₐ′-nₚ′3′ (IId).

[0583] When the antisense RNAi oligonucleotide is represented by formula IIb, N_{b}′ represents 0-10, 0-7, 0-5, 0-4, 0-2, or 0 linked nucleosides. Each Nₐ′ independently represents 2-20, 2-15, or 2-10 linked nucleosides.

[0584] When the antisense RNAi oligonucleotide is represented by formula IIc, N_{b}′ represents 0-10, 0-7, 0-5, 0-4, 0-2, or 0 linked nucleosides. Each Nₐ′ independently represents 2-20, 2-15, or 2-10 linked nucleosides.

[0585] When the antisense RNAi oligonucleotide is represented by formula IId, N_{b}′ represents 0-10, 0-7, 0-5, 0-4, 0-2, or 0 linked nucleosides. Each Nₐ′ independently represents 2-20, 2-15, or 2-10 linked nucleosides. Preferably, N_{b}′ is 0, 1, 2, 3, 4, 5, or 6.

[0586] In certain embodiments, k is 0 and 1 is 0 and the antisense RNAi oligonucleotide may be represented by the formula:

5′nₚ′—Nₐ′—Y′Y′Y′—Nₐ′-n_{q}′3′ (Ia).

[0587] When the antisense RNAi oligonucleotide is represented by formula IIa, each Nₐ′ independently represents 2-20, 2-15, or 2-10 linked nucleosides.

[0588] Each X′, Y′, and Z′ may be the same or different from each other.

[0589] Each nucleotide of the sense RNAi oligonucleotide and antisense RNAi oligonucleotide may be independently modified with LNA, UNA, cEt, HNA, CeNA, 2′-methoxyethyl, 2′-O-allyl, 2′-C-allyl, 2′-hydroxyl, or 2′-fluoro. For example, each nucleotide of the sense RNAi oligonucleotide and antisense RNAi oligonucleotide is independently modified with, 2′-O-methyl or 2′-fluoro. Each X, Y, Z, X′, Y′, and Z′, in particular, may represent a 2′-O-methyl modification or 2′-fluoro modification. In certain embodiments, the modification is a 2′-NMA modification.

[0590] In certain embodiments, the sense RNAi oligonucleotide of the RNAi agent may contain YYY motif occurring at 9, 10, and 11 positions of the RNAi oligonucleotide when the duplex region is 21 nucleotides, the count starting from the 1^{st} nucleotide from the 5′-end, or optionally, the count starting at the 1^{st} paired nucleotide within the duplex region, from the 5′-end; and Y represents 2′-F modification. The sense RNAi oligonucleotide may additionally contain XXX motif or ZZZ motifs as wing modifications at the opposite end of the duplex region; and XXX and ZZZ each independently represents a 2′-O-methyl modification or 2′-fluoro modification.

[0591] In certain embodiments, the antisense RNAi oligonucleotide may contain Y′Y′Y′ motif occurring at positions 11, 12, 13 of the RNAi oligonucleotide, the count starting from the 1^{st} nucleotide from the 5′-end, or optionally, the count starting at the 1^{st} paired nucleotide within the duplex region, from the 5′-end; and Y′ represents 2′-O-methyl modification. The antisense RNAi oligonucleotide may additionally contain X′X′X′ motif or Z′Z′Z′ motif as wing modifications at the opposite end of the duplex region; and X′X′X′ or Z′Z′Z′ each independently represents a 2′-O-methyl modification or 2′-fluoro modification.

[0592] The sense RNAi oligonucleotide represented by any one of the above formulas Ia, Ib, Ic, and Id forms a duplex with an antisense RNAi oligonucleotide being represented by any one of the formulas IIa, IIb, IIc, and Hd, respectively.

[0593] Accordingly, the RNAi agents described herein may comprise a sense RNAi oligonucleotide and an antisense RNAi oligonucleotide, each RNAi oligonucleotide having 14 to 30 nucleotides, the RNAi duplex represented by formula (III):

Sense: 5′nₚ-Nₐ—(XXX)ᵢ—N_{b}—YYY—N_{b}—(ZZZ)ⱼ—Nₐ-n_{q}3′

Antisense: 3′nₚ′—Nₐ′—(X′X′X′)ₖ—N_{b}′—Y′Y′Y′—N_{b}′—(Z′Z′Z′)ᵢ—Nₐ′-n_{q}′5′
[0594] wherein:
[0595] j, k, and l are each independently 0 or 1;
[0596] p, p′, q, and q′ are each independently 0-6;
[0597] each Nₐ and Nₐ′ independently represents 0-25 linked nucleosides, each sequence comprising at least two differently modified nucleotides;
[0598] each N_{b} and N_{b}′ independently represents 0-10 linked nucleosides;
[0599] wherein each nₚ′, nₚ, n_{q}′ and n_{q}, each of which may or may not be present, independently represents an overhang nucleotide; and
[0600] XXX, YYY, X′X′X′, Y′Y′Y′, and Z′Z′Z′ each independently represent one motif of three identical modifications on three consecutive nucleotides.

[0601] In certain embodiments, i is 0 and j is 0; or i is 1 and j is 0; ori is 0 and j is 1; or both i and j are 0; or both i and j are 1. In another embodiment, k is 0 and l is 0; or k is 1 and l is 0, or k is 0 and l is 1; or both k and l are 0; or both k and l are 1.

[0602] Exemplary combinations of the sense RNAi oligonucleotide and antisense RNAi oligonucleotide forming a RNAi duplex include the formulas below:

5′nₚ-Nₐ—YYY—Nₐ-n_{q}3′

3′np′—Nₐ′—Y′Y′Y′—Nₐ′n_{q}′5′ (IIIa)

5′nₚ-Nₐ—YYY—N_{b}—ZZZ—Nₐ-n_{q}3′

3′nₚ′-Nₐ′—Y′Y′Y′—N_{b}′—Z′Z′Z′—Nₐ′n_{q}′5′ (IIIb)

5′nₚ-Nₐ—XXX—N_{b}—YYY—Nₐ-n_{q}3′

3′nₚ′—Nₐ′—X′X′X′—N_{b}′—Y′Y′Y′—Nₐ′-n_{q}′5′ (IIIc)

5′nₚ-Nₐ—XXX—N_{b}—YYY—N_{b}—ZZZ—Nₐ-n_{q}3′

3′nₚ′—Nₐ—X′X′X′—N_{b}′—Y′Y′Y′—N_{b}′—Z′Z′Z′—Nₐ-n_{q}′5′ (IIId)

[0603] When the RNAi agent is represented with formula IIIa, each Nₐ independently represents 2-20, 2-15, or 2-10 linked nucleosides.

[0604] When the RNAi agent is represented with formula IIIb, each N_{b} independently represents 1-10, 1-7, 1-5, or 1-4 linked nucleosides. Each Nₐ independently represents 2-20, 2-15, or 2-10 linked nucleosides.

[0605] When the RNAi agent is represented with formula IIIc, each N_{b}, N_{b}′ independently represents 0-10, 0-7, 0-10, 0-7, 0-5, 0-4, 0-2, or 0 linked nucleosides. Each Nₐ independently represents 2-20, 2-15, or 2-10 linked nucleosides.

[0606] When the RNAi agent is represented with formula IIId, each N_{b}, N_{b}′ independently represents 0-10, 0-7, 0-10, 0-7, 0-5, 0-4, 0-2, or 0 linked nucleosides. Each Nₐ, Nₐ′ independently 2-20, 2-15, or 2-10 linked nucleosides. Each Nₐ, Nₐ′, N_{b}, N_{b}′ independently comprises modifications of alternating pattern.

[0607] Each of X, Y, and Z in formulas III, IIIa, IIIb, IIIc, and IIId may be the same or different from each other.

[0608] When the RNAi agent is represented by formula III, IIIa, IIIb, IIIc, and/or IIId, at least one of the Y nucleotides may form a base pair with one of the Y′ nucleotides. Alternatively, at least two of the Y nucleotides may form base pairs with the corresponding Y′ nucleotides; or all three of the Y nucleotides may form base pairs with the corresponding Y′ nucleotides.

[0609] When the RNAi agent is represented by formula IIIb or IIId, at least one of the Z nucleotides may form a base pair with one of the Z′ nucleotides. Alternatively, at least two of the Z nucleotides may form base pairs with the corresponding Z′ nucleotides; or all three of the Z nucleotides may form base pairs with the corresponding Z′ nucleotides.

[0610] When the RNAi agent is represented by formula IIIc or IIId, at least one of the X nucleotides may form a base pair with one of the X′ nucleotides. Alternatively, at least two of the X nucleotides may form base pairs with the corresponding X′ nucleotides; or all three of the X nucleotides may form base pairs with the corresponding X′ nucleotides.

[0611] In certain embodiments, the modification of the Y nucleotide is different than the modification on the Y′ nucleotide, the modification on the Z nucleotide is different than the modification on the Z′ nucleotide, and/or the modification on the X nucleotide is different than the modification on the X′ nucleotide.

[0612] In certain embodiments, when the RNAi agent is represented by the formula IIId, the Nₐ modifications are 2′-O-methyl or 2′-fluoro modifications. In another embodiment, when the RNAi agent is represented by formula IIId, the Nₐ modifications are 2′-O-methyl or 2′-fluoro modifications and nₚ′>0 and at least one nₚ′ is linked to a neighboring nucleotide via phosphorothioate linkage. In other embodiments, when the RNAi agent is represented by formula IIId, the Nₐ modifications are 2′-O-methyl or 2′-fluoro modifications, nₚ′>0 and at least one nₚ′ is linked to a neighboring nucleotide via phosphorothioate linkage, and the sense RNAi oligonucleotide is conjugated to one or more cell targeting group attached through a bivalent or trivalent branched linker. In certain embodiments, when the RNAi agent is represented by formula Hid, the Nₐ modifications are 2′-O-methyl or 2′-fluoro modifications, nₚ′>0 and at least one nₚ′ is linked to a neighboring nucleotide via phosphorothioate linkage, the sense RNAi oligonucleotide comprises at least one phosphorothioate linkage and the sense RNAi oligonucleotide is conjugated to one or more cell targeting group attached through a bivalent or trivalent branched linker.

[0613] In certain embodiments, when the RNAi agent is represented by the formula IIIa, the Nₐ modifications are 2′-O-methyl or 2′-fluoro modifications and nₚ′>0 and at least one nₚ′ is linked to a neighboring nucleotide via phosphorothioate linkage, the sense RNAi oligonucleotide comprises at least one phosphorothioate linkage and the sense RNAi oligonucleotide is conjugated to one or more cell targeting group attached through a bivalent or trivalent branched linker.

[0614] In certain embodiments, the modification is a 2′-NMA modification.

[0615] In certain embodiments, the antisense strand may comprise a stabilized phosphate group attached to the 5′ position of the 5′-most nucleoside. In certain embodiments, the stabilized phosphate group comprises an (E)-vinyl phosphonate. In certain embodiments, the stabilized phosphate group comprises a cyclopropyl phosphonate.

[0616] In certain embodiments, the antisense strand may comprise a seed-pairing destabilizing modification. In certain embodiments, the seed-pairing destabilizing modification is located at position 6 (counting from the 5′ end). In certain embodiments, the seed-pairing destabilizing modification is located at position 7 (counting from the 5′ end). In certain embodiments, the seed-pairing destabilizing modification is a GNA sugar surrogate. In certain embodiments, the seed-pairing destabilizing modification is an (S)-GNA. In certain embodiments, the seed-pairing destabilizing modification is a UNA. In certain embodiments, the seed-pairing destabilizing modification is a morpholino.

[0617] In certain embodiments, the sense strand may comprise an inverted abasic sugar moiety attached to the 5′-most nucleoside. In certain embodiments, the sense strand may comprise an inverted abasic sugar moiety attached to the 3′-most nucleoside. In certain embodiments, the sense strand may comprise inverted abasic sugar moieties attached to both the 5′-most and 3′-most nucleosides.

[0618] In certain embodiments, the sense strand may comprise a conjugate attached at position 6 (counting from the 5′ end). In certain embodiments, the conjugate is attached at the 2′ position of the nucleoside. In certain embodiments the conjugate is a C₁₆ lipid conjugate. In certain embodiments, the modified nucleoside at position 6 of the sense strand has a 2′-O-hexadecyl modified sugar moiety.

[0619] IV. Antisense Activity

[0620] In certain embodiments, oligomeric compounds and oligomeric duplexes are capable of hybridizing to a target nucleic acid, resulting in at least one antisense activity; such oligomeric compounds and oligomeric duplexes are antisense compounds. In certain embodiments, antisense compounds have antisense activity when they reduce or inhibit the amount or activity of a target nucleic acid by 25% or more in a standard in vitro assay. In certain embodiments, antisense compounds selectively affect one or more target nucleic acid. Such antisense compounds comprise a nucleobase sequence that hybridizes to one or more target nucleic acid, resulting in one or more desired antisense activity and does not hybridize to one or more non-target nucleic acid or does not hybridize to one or more non-target nucleic acid in such a way that results in significant undesired antisense activity.

[0621] In certain antisense activities, hybridization of an antisense compound to a target nucleic acid results in recruitment of a protein that cleaves the target nucleic acid. For example, certain antisense compounds result in RNase H mediated cleavage of the target nucleic acid. RNase H is a cellular endonuclease that cleaves the RNA strand of an RNA:DNA duplex. The DNA in such an RNA:DNA duplex need not be unmodified DNA. In certain embodiments, described herein are antisense compounds that are sufficiently “DNA-like” to elicit RNase H activity. In certain embodiments, one or more non-DNA-like nucleoside in the gap of a gapmer is tolerated.

[0622] In certain antisense activities, an antisense compound or a portion of an antisense compound is loaded into an RNA-induced silencing complex (RISC), ultimately resulting in cleavage of the target nucleic acid. For example, certain antisense compounds result in cleavage of the target nucleic acid by Argonaute. Antisense compounds that are loaded into RISC are RNAi agents. RNAi agents may be double-stranded (siRNA or dsRNAi) or single-stranded (ssRNA).

[0623] In certain embodiments, hybridization of an antisense compound to a target nucleic acid does not result in recruitment of a protein that cleaves that target nucleic acid. In certain embodiments, hybridization of the antisense compound to the target nucleic acid results in alteration of splicing of the target nucleic acid. In certain embodiments, hybridization of an antisense compound to a target nucleic acid results in inhibition of a binding interaction between the target nucleic acid and a protein or other nucleic acid. In certain embodiments, hybridization of an antisense compound to a target nucleic acid results in alteration of translation of the target nucleic acid.

[0624] Antisense activities may be observed directly or indirectly. In certain embodiments, observation or detection of an antisense activity involves observation or detection of a change in an amount of a target nucleic acid or protein encoded by such target nucleic acid, a change in the ratio of splice variants of a nucleic acid or protein and/or a phenotypic change in a cell or animal.

[0625] V. Certain Target Nucleic Acids

[0626] In certain embodiments, oligomeric compounds comprise or consist of an oligonucleotide comprising a region that is complementary to a target nucleic acid. In certain embodiments, the target nucleic acid is an endogenous RNA molecule. In certain embodiments, the target nucleic acid encodes a protein. In certain such embodiments, the target nucleic acid is selected from: a mature mRNA and a pre-mRNA, including intronic, exonic and untranslated regions. In certain embodiments, the target RNA is a mature mRNA. In certain embodiments, the target nucleic acid is a pre-mRNA. In certain embodiments, the target region is entirely within an intron. In certain embodiments, the target region spans an intron/exon junction. In certain embodiments, the target region is at least 50% within an intron. In certain embodiments, the target nucleic acid is the RNA transcriptional product of a retrogene. In certain embodiments, the target nucleic acid is a non-coding RNA. In certain embodiments, the target non-coding RNA is selected from: a long non-coding RNA, a short non-coding RNA, an intronic RNA molecule.

[0627] A. Complementarity/Mismatches to the Target Nucleic Acid and Duplex Complementarity

[0628] In certain embodiments, oligonucleotides are complementary to the target nucleic acid over the entire length of the oligonucleotide. In certain embodiments, oligonucleotides are 99%, 95%, 90%, 85%, or 80% complementary to the target nucleic acid. In certain embodiments, oligonucleotides are at least 80% complementary to the target nucleic acid over the entire length of the oligonucleotide and comprise a region that is 100% or fully complementary to a target nucleic acid. In certain embodiments, the region of full complementarity is from 6 to 20, 10 to 18, or 18 to 20 nucleobases in length.

### Gapmer Oligonucleotides

[0629] It is possible to introduce mismatch bases without eliminating activity. For example, Gautschi et al (J. Natl. Cancer Inst. 93:463-471, March 2001) demonstrated the ability of an oligonucleotide having 100% complementarity to the bcl-2 mRNA and having 3 mismatches to the bcl-xL mRNA to reduce the expression of both bcl-2 and bcl-xL in vitro and in vivo. Furthermore, this oligonucleotide demonstrated potent anti-tumor activity in vivo. Maher and Dolnick (Nuc. Acid. Res. 16:3341-3358, 1988) tested a series of tandem 14 nucleobase oligonucleotides, and 28 and 42 nucleobase oligonucleotides comprised of the sequence of two or three of the tandem oligonucleotides, respectively, for their ability to arrest translation of human DHFR in a rabbit reticulocyte assay. Each of the three 14 nucleobase oligonucleotides alone was able to inhibit translation, albeit at a more modest level than the 28 or 42 nucleobase oligonucleotides.

[0630] In certain embodiments, oligonucleotides comprise one or more mismatched nucleobases relative to the target nucleic acid. In certain embodiments, antisense activity against the target is reduced by such mismatch, but activity against a non-target is reduced by a greater amount. Thus, in certain embodiments selectivity of the oligonucleotide is improved. In certain embodiments, the mismatch is specifically positioned within an oligonucleotide having a gapmer motif. In certain embodiments, the mismatch is at position 1, 2, 3, 4, 5, 6, 7, or 8 from the 5′-end of the gap region. In certain embodiments, the mismatch is at position 9, 8, 7, 6, 5, 4, 3, 2, 1 from the 3′-end of the gap region. In certain embodiments, the mismatch is at position 1, 2, 3, or 4 from the 5′-end of the wing region. In certain embodiments, the mismatch is at position 4, 3, 2, or 1 from the 3′-end of the wing region.

### Antisense RNAi Oligonucleotides

[0631] In certain embodiments, antisense RNAi oligonucleotides comprise one or more mismatched nucleobases relative to the target nucleic acid. In certain embodiments, RNAi activity against the target is reduced by such mismatch, but activity against a non-target is reduced by a greater amount. Thus, in certain embodiments selectivity of the antisense RNAi oligonucleotides is improved.

[0632] In certain embodiments, antisense RNAi oligonucleotides comprise a targeting region complementary to the target nucleic acid. In certain embodiments, the targeting region comprises or consists of at least 8, at least 9, at least 10, at least 11, at least 12, at least 13, at least 14, at least 15, at least 16, at least 17, at least 18, at least 19, at least 20, at least 21, at least 22, at least 23, at least 24, or at least 25 contiguous nucleotides. In certain embodiments, the targeting region constitutes 70%, 80%, 85%, 90%, or 95% of the nucleosides of the antisense RNAi oligonucleotide. In certain embodiments, the targeting region constitutes all of the nucleosides of the antisense RNAi oligonucleotide. In certain embodiments, the targeting region of the antisense RNAi oligonucleotide is at least 99%, 95%, 90%, 85%, or 80% complementary to the target nucleic acid. In certain embodiments, the targeting region of the antisense RNAi oligonucleotide is 100% complementary to the target nucleic acid.

### Sense RNAi Oligonucleotides

[0633] In certain embodiments, RNAi agents comprise a sense RNAi oligonucleotide. In such embodiments, sense RNAi oligonucleotides comprise an antisense hybridizing region complementary to the antisense RNAi oligonucleotide. In certain embodiments, the antisense hybridizing region comprises or consists of at least 8, at least 9, at least 10, at least 11, at least 12, at least 13, at least 14, at least 15, at least 16, at least 17, at least 18, at least 19, at least 20, at least 21, at least 22, at least 23, at least 24, or at least 25 contiguous nucleotides. In certain embodiments, the antisense hybridizing region constitutes 70%, 80%, 85%, 90%, or 95% of the nucleosides of the sense RNAi oligonucleotide. In certain embodiments, the antisense hybridizing region constitutes all of the nucleosides of the sense RNAi oligonucleotide. In certain embodiments, the antisense hybridizing region of the sense RNAi oligonucleotide is at least 99%, 95%, 90%, 85%, or 80% complementary to the antisense RNAi oligonucleotide. In certain embodiments, the antisense hybridizing region of the sense RNAi oligonucleotide is 100% complementary to the antisense RNAi oligonucleotide.

[0634] The hybridizing region of a sense RNAi oligonucleotide hybridizes with the antisense RNAi oligonucleotide to form a duplex region. In certain embodiments, such duplex region consists of 7 hybridized pairs of nucleosides (one of each pair being on the antisense RNAi oligonucleotide and the other of each pair bien on the sense RNAi oligonucleotide). In certain embodiments, a duplex region comprises least 8, at least 9, at least 10, at least 11, at least 12, at least 13, at least 14, at least 15, at least 16, at least 17, at least 18, at least 19, at least 20, at least 21, at least 22, at least 23, at least 24, or at least 25 hybridized pairs. In certain embodiments, each nucleoside of antisense RNAi oligonucleotide is paired in the duplex region (i.e., the antisense RNAi oligonucleotide has no overhanging nucleosides). In certain embodiments, the antisense RNAi oligonucleotide includes unpaired nucleosides at the 3′-end and/or the 5′end (overhanging nucleosides). In certain embodiments, each nucleoside of sense RNAi oligonucleotide is paired in the duplex region (i.e., the sense RNAi oligonucleotide has no overhanging nucleosides). In certain embodiments, the sense RNAi oligonucleotide includes unpaired nucleosides at the 3′-end and/or the 5′end (overhanging nucleosides). In certain embodiments, duplexes formed by the antisense RNAi oligonucleotide and the sense RNAi oligonucleotide do not include any overhangs at one or both ends. Such ends without overhangs are referred to as blunt. In certain embodiments wherein the antisense RNAi oligonucleotide has overhanging nucleosides, one or more of those overhanging nucleosides are complementary to the target nucleic acid. In certain embodiments wherein the antisense RNAi oligonucleotide has overhanging nucleosides, one or more of those overhanging nucleosides are not complementary to the target nucleic acid.

[0635] B. APOE

[0636] In certain embodiments, oligomeric compounds comprise or consist of an oligonucleotide comprising a region that is complementary to a target nucleic acid, wherein the target nucleic acid is an APOE nucleic acid. In certain embodiments, the APOE nucleic acid has the sequence set forth as SEQ ID NO: 1 (GENBANK Accession No. NC_000019.10, truncated from nucleotides 44903001 to 44912000). In certain embodiments, the APOE nucleic acid has the sequence set forth as SEQ ID NO: 2 (GENBANK Accession No. NM_001302688.1). In certain embodiments, the APOE nucleic acid has the sequence set forth as SEQ ID NO: 3 (GENBANK Accession No. AU126799.1). In certain embodiments, the APOE nucleic acid has the sequence set forth as SEQ ID NO: 4 (GENBANK Accession No. BI602495.1). In certain embodiments, the APOE nucleic acid has the sequence set forth as SEQ ID NO: 5 (the complement of GENBANK Accession No. CA306379.1). In certain embodiments, the APOE nucleic acid has the sequence set forth as SEQ ID NO: 6 (GENBANK Accession No. NM_000041.2 with T-->C at pos 471 to result in APOE4 mutant mRNA).

[0637] In certain embodiments, contacting a cell with an oligomeric compound complementary to SEQ ID NO: 1, SEQ ID NO: 2, SEQ ID NO: 3, SEQ ID NO: 4, or SEQ ID NO: 5 reduces the amount of APOE RNA, and in certain embodiments reduces the amount of APOE protein in the cell. In certain embodiments, administering an oligomeric compound complementary to SEQ ID NO: 1, SEQ ID NO: 2, SEQ ID NO: 3, SEQ ID NO: 4, or SEQ ID NO: 5 to a subject in need thereof results in reduced amyloid plaques and/or reduced neurofibrillary tangles in the brain of the subject as compared to the amount of amyloid plaques and/or neurofibrillary tangles in the brain of the subject before administering. In certain embodiments, administering an oligomeric compound complementary to SEQ ID NO: 1, SEQ ID NO: 2, SEQ ID NO: 3, SEQ ID NO: 4, or SEQ ID NO: 5 to a subject in need thereof results in less amyloid plaques and/or less neurofibrillary tangles in the brain of the subject as compared to the amount of amyloid plaques and/or neurofibrillary tangles in the brain of a control subject not receiving the oligomeric compound. In certain embodiments, the oligomeric compound consists of a modified oligonucleotide. In certain embodiments, the oligomeric compound consists of a modified oligonucleotide and a conjugate group. In certain embodiments, the oligomeric compound is paired with an additional oligomeric compound in an oligomeric duplex. In certain embodiments, the oligomeric duplex comprises a conjugate group.

[0638] C. Certain Target Nucleic Acids in Certain Tissues

[0639] In certain embodiments, oligomeric compounds comprise or consist of an oligonucleotide comprising a region that is complementary to a target nucleic acid, wherein the target nucleic acid is expressed in a pharmacologically relevant tissue. In certain embodiments, the pharmacologically relevant tissues are the cells and tissues that comprise the central nervous system. Such tissues include the brain, cortex, spinal cord, and the hippocampus.

[0640] VI. Certain Pharmaceutical Compositions

[0641] In certain embodiments, described herein are pharmaceutical compositions comprising one or more oligomeric compounds. In certain embodiments, the one or more oligomeric compounds each consists of a modified oligonucleotide. In certain embodiments, the pharmaceutical composition comprises a pharmaceutically acceptable diluent or carrier. In certain embodiments, a pharmaceutical composition comprises or consists of a sterile saline solution and one or more oligomeric compound. In certain embodiments, the sterile saline is pharmaceutical grade saline. In certain embodiments, a pharmaceutical composition comprises or consists of one or more oligomeric compound and sterile water. In certain embodiments, the sterile water is pharmaceutical grade water. In certain embodiments, a pharmaceutical composition comprises or consists of one or more oligomeric compound and phosphate-buffered saline (PBS). In certain embodiments, the sterile PBS is pharmaceutical grade PBS. In certain embodiments, a pharmaceutical composition comprises or consists of one or more oligomeric compound and artificial cerebrospinal fluid. In certain embodiments, the artificial cerebrospinal fluid is pharmaceutical grade.

[0642] In certain embodiments, a pharmaceutical composition comprises a modified oligonucleotide and artificial cerebrospinal fluid (aCSF). In certain embodiments, a pharmaceutical composition consists of a modified oligonucleotide and artificial cerebrospinal fluid. In certain embodiments, a pharmaceutical composition consists essentially of a modified oligonucleotide and artificial cerebrospinal fluid. In certain embodiments, the artificial cerebrospinal fluid is pharmaceutical grade.

[0643] In certain embodiments, aCSF comprises sodium chloride, potassium chloride, sodium dihydrogen phosphate dihydrate, sodium phosphate dibasic anhydrous, calcium chloride dihydrate, and magnesium chloride hexahydrate. In certain embodiments, the pH of an aCSF solution is modulated with a suitable pH-adjusting agent, for example, with acids such as hydrochloric acid and alkalis such as sodium hydroxide, to a range of from about 7.1-7.3, or to about 7.2.

[0644] In certain embodiments, pharmaceutical compositions comprise one or more oligomeric compound and one or more excipients. In certain embodiments, excipients are selected from water, salt solutions, alcohol, polyethylene glycols, gelatin, lactose, amylase, magnesium stearate, talc, silicic acid, viscous paraffin, hydroxymethylcellulose and polyvinylpyrrolidone.

[0645] In certain embodiments, oligomeric compounds may be admixed with pharmaceutically acceptable active and/or inert substances for the preparation of pharmaceutical compositions or formulations. Compositions and methods for the formulation of pharmaceutical compositions depend on a number of criteria, including, but not limited to, route of administration, extent of disease, or dose to be administered.

[0646] In certain embodiments, pharmaceutical compositions comprising an oligomeric compound encompass any pharmaceutically acceptable salts of the oligomeric compound, esters of the oligomeric compound, or salts of such esters. In certain embodiments, pharmaceutical compositions comprising oligomeric compounds comprising one or more oligonucleotide, upon administration to an animal, including a human, are capable of providing (directly or indirectly) the biologically active metabolite or residue thereof. Accordingly, for example, the disclosure is also drawn to pharmaceutically acceptable salts of oligomeric compounds, prodrugs, pharmaceutically acceptable salts of such prodrugs, and other bioequivalents. In certain embodiments, pharmaceutically acceptable salts comprise inorganic salts, such as monovalent or divalent inorganic salts. Suitable pharmaceutically acceptable salts include, but are not limited to, sodium, potassium, calcium, and magnesium salts. In certain embodiments, prodrugs comprise one or more conjugate group attached to an oligonucleotide, wherein the conjugate group is cleaved by endogenous nucleases within the body.

[0647] In certain embodiments, oligomeric compounds are lyophilized and isolated as sodium salts. In certain embodiments, the sodium salt of an oligomeric compound is mixed with a pharmaceutically acceptable diluent. In certain embodiments, the pharmaceutically acceptable diluent comprises sterile saline, sterile water, PBS, or aCSF. In certain embodiments, the sodium salt of an oligomeric compound is mixed with PBS. In certain embodiments, the sodium salt of an oligomeric compound is mixed with aCSF.

[0648] Lipid moieties have been used in nucleic acid therapies in a variety of methods. In certain such methods, the nucleic acid, such as an oligomeric compound, is introduced into preformed liposomes or lipoplexes made of mixtures of cationic lipids and neutral lipids. In certain methods, DNA complexes with mono- or poly-cationic lipids are formed without the presence of a neutral lipid. In certain embodiments, a lipid moiety is selected to increase distribution of a pharmaceutical agent to a particular cell or tissue. In certain embodiments, a lipid moiety is selected to increase distribution of a pharmaceutical agent to fat tissue. In certain embodiments, a lipid moiety is selected to increase distribution of a pharmaceutical agent to muscle tissue.

[0649] In certain embodiments, pharmaceutical compositions comprise a delivery system. Examples of delivery systems include, but are not limited to, liposomes and emulsions. Certain delivery systems are useful for preparing certain pharmaceutical compositions including those comprising hydrophobic compounds. In certain embodiments, certain organic solvents such as dimethylsulfoxide are used.

[0650] In certain embodiments, pharmaceutical compositions comprise one or more tissue-specific delivery molecules designed to deliver the one or more pharmaceutical agents of the present invention to specific tissues or cell types. For example, in certain embodiments, pharmaceutical compositions include liposomes coated with a tissue-specific antibody.

[0651] In certain embodiments, pharmaceutical compositions comprise a co-solvent system. Certain of such co-solvent systems comprise, for example, benzyl alcohol, a nonpolar surfactant, a water-miscible organic polymer, and an aqueous phase. In certain embodiments, such co-solvent systems are used for hydrophobic compounds. A non-limiting example of such a co-solvent system is the VPD co-solvent system, which is a solution of absolute ethanol comprising 3% w/v benzyl alcohol, 8% w/v of the nonpolar surfactant Polysorbate 80™ and 65% w/v polyethylene glycol 300. The proportions of such co-solvent systems may be varied considerably without significantly altering their solubility and toxicity characteristics. Furthermore, the identity of co-solvent components may be varied: for example, other surfactants may be used instead of Polysorbate 80™; the fraction size of polyethylene glycol may be varied; other biocompatible polymers may replace polyethylene glycol, e.g., polyvinyl pyrrolidone; and other sugars or polysaccharides may substitute for dextrose.

[0652] In certain embodiments, pharmaceutical compositions are prepared for oral administration. In certain embodiments, pharmaceutical compositions are prepared for buccal administration. In certain embodiments, a pharmaceutical composition is prepared for administration by injection (e.g., intravenous, subcutaneous, intramuscular, intrathecal (IT), intracerebroventricular (ICV), etc.). In certain of such embodiments, a pharmaceutical composition comprises a carrier and is formulated in aqueous solution, such as water or physiologically compatible buffers such as Hanks's solution, Ringer's solution, or physiological saline buffer. In certain embodiments, other ingredients are included (e.g., ingredients that aid in solubility or serve as preservatives). In certain embodiments, injectable suspensions are prepared using appropriate liquid carriers, suspending agents and the like. Certain pharmaceutical compositions for injection are presented in unit dosage form, e.g., in ampoules or in multi-dose containers. Certain pharmaceutical compositions for injection are suspensions, solutions or emulsions in oily or aqueous vehicles, and may contain formulatory agents such as suspending, stabilizing and/or dispersing agents. Certain solvents suitable for use in pharmaceutical compositions for injection include, but are not limited to, lipophilic solvents and fatty oils, such as sesame oil, synthetic fatty acid esters, such as ethyl oleate or triglycerides, and liposomes.

[0653] Under certain conditions, certain compounds disclosed herein act as acids. Although such compounds may be drawn or described in protonated (free acid) form, or ionized and in association with a cation (salt) form, aqueous solutions of such compounds exist in equilibrium among such forms. For example, a phosphodiester linkage of an oligonucleotide in aqueous solution exists in equilibrium among free acid, anion and salt forms. Unless otherwise indicated, compounds described herein are intended to include all such forms. Moreover, certain oligonucleotides have several such linkages, each of which is in equilibrium. Thus, oligonucleotides in solution exist in an ensemble of forms at multiple positions all at equilibrium. The term “oligonucleotide” is intended to include all such forms. Drawn structures necessarily depict a single form. Nevertheless, unless otherwise indicated, such drawings are likewise intended to include corresponding forms. Herein, a structure depicting the free acid of a compound followed by the term “or a pharmaceutically acceptable salt thereof” expressly includes all such forms that may be fully or partially protonated/de-protonated/in association with a cation or a combination of cations. In certain embodiments, one or more specific cation is identified. The cations include, but are not limited to, sodium, potassium, calcium, and magnesium. In certain embodiments, a structure depicting the free acid of a compound followed by the term “or a pharmaceutically acceptable salt thereof” expressly includes all such forms that may be fully or partially protonated/de-protonated/in association with one or more cations selected from sodium, potassium, calcium, and magnesium.

[0654] In certain embodiments, modified oligonucleotides or oligomeric compounds are in aqueous solution with sodium. In certain embodiments, modified oligonucleotides or oligomeric compounds are in aqueous solution with potassium. In certain embodiments, modified oligonucleotides or oligomeric compounds are in PBS. In certain embodiments, modified oligonucleotides or oligomeric compounds are in water. In certain such embodiments, the pH of the solution is adjusted with NaOH and/or HCl to achieve a desired pH.

[0655] Herein, certain specific doses are described. A dose may be in the form of a dosage unit. For clarity, a dose (or dosage unit) of a modified oligonucleotide or an oligomeric compound in milligrams indicates the mass of the free acid form of the modified oligonucleotide or oligomeric compound. As described above, in aqueous solution, the free acid is in equilibrium with anionic and salt forms. However, for the purpose of calculating dose, it is assumed that the modified oligonucleotide or oligomeric compound exists as a solvent-free, sodium-acetate free, anhydrous, free acid.

[0656] In certain embodiments, where a modified oligonucleotide or an oligomeric compound is in solution comprising sodium (e.g., saline), the modified oligonucleotide or oligomeric compound may be partially or fully de-protonated and in association with sodium ions. However, the mass of the protons is nevertheless counted toward the weight of the dose, and the mass of the sodium ions is not counted toward the weight of the dose. Thus, for example, a dose, or dosage unit, of 10 mg of a number of fully protonated molecules that weighs 10 mg. This would be equivalent to 10.58 mg of solvent-free, sodium acetate-free, anhydrous sodiated Compound No. 699467 or 10.65 mg of solvent-free, sodium acetate-free, anhydrous sodiated Compound No. 1381709.

[0657] In certain embodiments, where a modified oligonucleotide or oligomeric compound is in a solution, such as aCSF, comprising sodium, potassium, calcium, and magnesium, the modified oligonucleotide or oligomeric compound may be partially or fully de-protonated and in association with sodium, potassium, calcium, and/or magnesium. However, the mass of the protons is nevertheless counted toward the weight of the dose, and the mass of the sodium, potassium, calcium, and magnesium ions is not counted toward the weight of the dose.

[0658] In certain embodiments, when an oligomeric compound comprises a conjugate group, the mass of the conjugate group is included in calculating the dose of such oligomeric compound. If the conjugate group also has an acid, the conjugate group is likewise assumed to be fully protonated for the purpose of calculating dose.

[0659] VII. Certain Hotspot Regions

[0660] 1. Nucleobases 1155-1178 of SEQ ID NO: 2

[0661] In certain embodiments, nucleobases 1155-1178 of SEQ ID NO: 2 comprise a hotspot region. In certain embodiments, modified oligonucleotides are complementary to a portion of nucleobases 1155-1178 of SEQ ID NO: 2. In certain embodiments, the modified oligonucleotides are 16 to 20 nucleobases in length. In certain embodiments, modified oligonucleotides are gapmers. In certain embodiments, the gapmers are cEt gapmers. In certain embodiments, the gapmers are MOE gapmers. In certain embodiments, the internucleoside linkages of the modified nucleotides are phosphorothioate internucleoside linkages and phosphodiester linkages, of a combination thereof.

[0662] The nucleobase sequences of SEQ ID NOs: 70, 71, 169, 170, 447, 448, 543, 552, 553, 919, 1061, 1132, 1938, 1991, 2066, 2154, 2226, 2259, 2324, 2417, and 2486 are complementary to nucleobases 1155-1178 of SEQ ID NO: 2.

[0663] The nucleobase sequences of Compound NOs: 426048, 426049, 689013, 689014, 689015, 689016, 689118, 708021, 708022, 729682, 729683, 942586, 942587, 942588, 1516539, 1516559, 1516570, 1516656, 1516771, 1516839, 1516862, 1516866, and 1516877 are complementary to nucleobases 1155-1178 of SEQ ID NO: 2.

[0664] In certain embodiments, modified oligonucleotides complementary to a portion of nucleobases 1155-1178 of SEQ ID NO: 2 achieve at least 46% reduction of APOE RNA in a standard in vitro assay. In certain embodiments, modified oligonucleotides complementary to a portion of nucleobases 1155-1178 of SEQ ID NO: 2 achieve an average of 83.4% reduction of APOE RNA in a standard in vitro assay.

[0665] 2. Nucleobases 1207-1230 of SEQ ID NO: 2

[0666] In certain embodiments, nucleobases 1207-1230 of SEQ ID NO: 2 comprise a hotspot region. In certain embodiments, modified oligonucleotides are complementary to a portion of nucleobases 1207-1230 of SEQ ID NO: 2. In certain embodiments, the modified oligonucleotides are 16 to 20 nucleobases in length. In certain embodiments, modified oligonucleotides are gapmers. In certain embodiments, the gapmers are cEt gapmers. In certain embodiments, the gapmers are MOE gapmers. In certain embodiments, the internucleoside linkages of the modified nucleotides are phosphorothioate internucleoside linkages and phosphodiester linkages, of a combination thereof.

[0667] The nucleobase sequences of SEQ ID NOs: 460, 461, 462, 563, 564, 565, 566, 990, 1469, 1572, 1653, 1746, 1914, 1955, 2026, 2110, 2211, 2247, 2344, 2393, and 2481 are complementary to nucleobases 1207-1230 of SEQ ID NO: 2.

[0668] The nucleobase sequences of Compound NOs: 689028, 689029, 689030, 729693, 729694, 729695, 729696, 942591, 1516614, 1516652, 1516784, 1516831, 1516890, 1516931, 1516936, 1516973, 1517107, 1517281, 1517604, 1517622, and 1517806 are complementary to nucleobases 1207-1230 of SEQ ID NO: 2.

[0669] In certain embodiments, modified oligonucleotides complementary to a portion of nucleobases 1207-1230 of SEQ ID NO: 2 achieve at least 30% reduction of APOE RNA in a standard in vitro assay. In certain embodiments, modified oligonucleotides complementary to a portion of nucleobases 1207-1230 of SEQ ID NO: 2 achieve an average of 60.9% reduction of APOE RNA in a standard in vitro assay.

[0670] 3. Nucleobases 1259-1295 of SEQ ID NO: 2

[0671] In certain embodiments, nucleobases 1259-1295 of SEQ ID NO: 2 comprise a hotspot region. In certain embodiments, modified oligonucleotides are complementary to a portion of nucleobases 1259-1295 of SEQ ID NO: 2. In certain embodiments, the modified oligonucleotides are 16 to 20 nucleobases in length. In certain embodiments, modified oligonucleotides are gapmers. In certain embodiments, the gapmers are cEt gapmers. In certain embodiments, the gapmers are MOE gapmers. In certain embodiments, the internucleoside linkages of the modified nucleotides are phosphorothioate internucleoside linkages and phosphodiester linkages, of a combination thereof.

[0672] The nucleobase sequences of SEQ ID NOs: 77, 475, 476, 477, 478, 479, 480, 481, 482, 483, 578, 579, 580, 581, 582, 622, 623, 624, 625, 626, 627, 1063, 1193, 1231, 1232, 1300, 1305, 1378, 1409, 1493, 1526, 1564, 1576, 1678, 1679, 1695, 1827, 1870, 1921, 1928, 1950, 1982, 2012, 2046, 2051, 2074, 2088, 2118, 2158, 2169, 2208, 2223, 2232, 2255, 2321, 2343, 2380, 2436, 2449, and 2451 are complementary to nucleobases 1259-1295 of SEQ ID NO: 2.

[0673] The nucleobase sequences of Compound NOs: 689043, 689044, 689045, 689046, 689047, 689048, 689049, 689050, 689051, 708024, 729709, 729710, 729711, 729712, 729713, 729714, 729715, 729716, 729717, 729718, 729719, 942598, 1516533, 1516549, 1516553, 1516613, 1516617, 1516658, 1516672, 1516681, 1516726, 1516740, 1516743, 1516758, 1516778, 1516834, 1516921, 1516932, 1516974, 1517003, 1517024, 1517063, 1517082, 1517130, 1517220, 1517383, 1517427, 1517508, 1517519, 1517578, 1517652, 1517770, 1517837, 1517841, 1517842, 1517849, 1517853, 1517874, 1517885, and 1517891 are complementary to nucleobases 1259-1295 of SEQ ID NO: 2.

[0674] In certain embodiments, modified oligonucleotides complementary to a portion of nucleobases 1259-1295 of SEQ ID NO: 2 achieve at least 29% reduction of APOE RNA in a standard in vitro assay. In certain embodiments, modified oligonucleotides complementary to a portion of nucleobases 1259-1295 of SEQ ID NO: 2 achieve an average of 72.4% reduction of APOE RNA in a standard in vitro assay.

[0675] 4. Nucleobases 1135-1166 of SEQ ID NO: 2

[0676] In certain embodiments, nucleobases 1135-1166 of SEQ ID NO: 2 comprise a hotspot region. In certain embodiments, oligomeric compounds or oligomeric duplexes comprise modified oligonucleotides that are complementary within nucleobases 1135-1166 of SEQ ID NO: 2. In certain embodiments, modified oligonucleotides are 23 nucleobases in length. In certain embodiments, modified oligonucleotides are antisense RNAi oligonucleotides. In certain embodiments, the antisense RNAi oligonucleotide has a sugar motif (from 5′ to 3′) of: mfinfmfmfinfinfmfinfmfinfmmm; wherein “m” represents a 2′-O methylribosyl sugar, and the “f” represents a 2′-fluororibosyl sugar; and a linkage motif (from 5′ to 3′) of: ssoooooooooooooooooss; wherein ‘o’ represents a phosphodiester internucleoside linkage and ‘s’ represents a phosphorothioate internucleoside linkage.

[0677] The nucleobase sequences of SEQ ID NOs: 2600, 2601, 2604, 2605, 2606, 2607, 2608, 2609, 2610, and 2613 are complementary within nucleobases 1135-1166 of SEQ ID NO: 2.

[0678] RNAi compounds 1518282, 1518283, 1518286, 1518299, 1518300, 1518301, 1518302, 1518303, 1518304, and 1518319 comprise an antisense RNAi oligonucleotide that is complementary within nucleobases 1135-1166 of SEQ ID NO: 2.

[0679] In certain embodiments, modified oligonucleotides complementary within nucleobases 1135-1166 of SEQ ID NO: 2 achieve at least 45% reduction of APOE RNA in a standard in vitro assay. In certain embodiments, modified oligonucleotides complementary within nucleobases 1135-1166 of SEQ ID NO: 2 achieve an average of 73.1% reduction of APOE RNA in a standard in vitro assay.

[0680] 5. Nucleobases 1255-1294 of SEQ ID NO: 2

[0681] In certain embodiments, nucleobases 1255-1294 of SEQ ID NO: 2 comprise a hotspot region. In certain embodiments, oligomeric compounds or oligomeric duplexes comprise modified oligonucleotides that are complementary within nucleobases 1255-1294 of SEQ ID NO: 2. In certain embodiments, modified oligonucleotides are 23 nucleobases in length. In certain embodiments, modified oligonucleotides are antisense RNAi oligonucleotides. In certain embodiments, the antisense RNAi oligonucleotide has a sugar motif (from 5′ to 3′) of: mfmfmfmfmfmfmfmfmfmfmmm; wherein “m” represents a 2′-O methylribosyl sugar, and the “f” represents a 2′-fluororibosyl sugar; and a linkage motif (from 5′ to 3′) of: ssooooooooooooooooooss; wherein ‘o’ represents a phosphodiester internucleoside linkage and ‘s’ represents a phosphorothioate internucleoside linkage.

[0682] The nucleobase sequences of SEQ ID NOs: 2720, 2721, 2722, 2726, 2727, 2729, 2730, 2731, 2732, 2733, 2734, 2735, 2736, 2737, 2738, and 2740 are complementary within nucleobases 1255-1294 of SEQ ID NO: 2.

[0683] RNAi compounds 1518642, 1518643, 1518644, 1518659, 1518660, 1518661, 1518663, 1518664, 1518677, 1518678, 1518679, 1518680, 1518681, 1518682, 1518695, 1518697, and 1518699 comprise an antisense RNAi oligonucleotide that is complementary within nucleobases 1255-1294 of SEQ ID NO: 2.

[0684] In certain embodiments, modified oligonucleotides complementary within nucleobases 1255-1294 of SEQ ID NO: 2 achieve at least 88% reduction of APOE RNA in a standard in vitro assay. In certain embodiments, modified oligonucleotides complementary within nucleobases 1255-1294 of SEQ ID NO: 2 achieve an average of 94.9% reduction of APOE RNA in a standard in vitro assay.

[0685] 6. Nucleobases 1255-1295 of SEQ ID NO: 2

[0686] In certain embodiments, nucleobases 1255-1295 of SEQ ID NO: 2 comprise a hotspot region. In certain embodiments, oligomeric compounds or oligomeric duplexes comprise modified oligonucleotides that are complementary within nucleobases 1255-1295 of SEQ ID NO: 2.

[0687] In certain embodiments, modified oligonucleotides are 23 nucleobases in length. In certain embodiments, modified oligonucleotides are antisense RNAi oligonucleotides. In certain embodiments, the antisense RNAi oligonucleotide has a sugar motif (from 5′ to 3′) of: mfmfmfmfmfmfmfmfmfmfmmm; wherein “m” represents a 2′-O methylribosyl sugar, and the “f” represents a 2′-fluororibosyl sugar; and a linkage motif (from 5′ to 3′) of: ssooooooooooooooooooss; wherein ‘o’ represents a phosphodiester internucleoside linkage and ‘s’ represents a phosphorothioate internucleoside linkage. In certain embodiments, the antisense RNAi oligonucleotide has a sugar motif (from 5′ to 3′) of: efmmmfmmmmmmmfmfmmmmmmm; wherein ‘e’ represents a 2′-MOE modified sugar moiety, each “m” represents a 2′-O-methylribosyl sugar, and each “f” represents a 2′-fluororibosyl sugar; and an internucleoside linkage motif (from 5′ to 3′) of: ssooooooooooooooooooss; wherein ‘o’ represents a phosphodiester internucleoside linkage and ‘s’ represents a phosphorothioate internucleoside linkage.

[0688] In certain embodiments, the modified oligonucleotides are 16 to 20 nucleobases in length. In certain embodiments, modified oligonucleotides are gapmers. In certain embodiments, the gapmers are cEt gapmers. In certain embodiments, the gapmers are MOE gapmers. In certain embodiments, the internucleoside linkages of the modified nucleotides are phosphorothioate internucleoside linkages and phosphodiester linkages, of a combination thereof.

[0689] The nucleobase sequences of SEQ ID NOs: 76, 77, 473, 474, 475, 476, 477, 478, 479, 480, 481, 482, 483, 576, 578, 579, 580, 581, 582, 622, 623, 624, 625, 626, 627, 1063, 1193, 1231, 1232, 1300, 1305, 1378, 1409, 1493, 1526, 1564, 1576, 1678, 1679, 1695, 1701, 1792, 1827, 1870, 1886, 1906, 1921, 1928, 1950, 1982, 2012, 2046, 2051, 2074, 2088, 2118, 2158, 2169, 2208, 2223, 2232, 2255, 2321, 2343, 2370, 2380, 2436, 2449, 2490, 2451, 2720, 2721, 2722, 2725, 2726, 2727, 2729, 2730, 2731, 2732, 2733, 2734, 2735, 2736, 2737, 2738, 2740, 2935, or 2936 are complementary within nucleobases 1255-1294 of SEQ ID NO: 2.

[0690] RNAi compounds 1518642, 1518643, 1518644, 1518659, 1518660, 1518661, 1518663, 1518664, 1518677, 1518678, 1518679, 1518680, 1518681, 1518682, 1518695, 1518697, and 1518699 comprise an antisense RNAi oligonucleotide that is complementary within nucleobases 1255-1294 of SEQ ID NO: 2. The nucleobase sequences of Compound Nos: 689043, 689044, 689045, 689046, 689047, 689048, 689049, 689050, 689051, 708024, 729709, 729710, 729711, 729712, 729713, 729714, 729715, 729716, 729717, 729718, 729719, 942598, 1516533, 1516549, 1516553, 1516613, 1516617, 1516658, 1516672, 1516681, 1516726, 1516740, 1516743, 1516758, 1516778, 1516834, 1516921, 1516932, 1516974, 1517003, 1517024, 1517063, 1517082, 1517130, 1517220, 1517383, 1517427, 1517508, 1517519, 1517578, 1517652, 1517770, 1517837, 1517841, 1517842, 1517849, 1517853, 1517874, 1517885, 1517891, 1642901, and 1644690 are complementary to nucleobases 1259-1295 of SEQ ID NO: 2.

[0691] In certain embodiments, modified oligonucleotides complementary within nucleobases 1255-1295 of SEQ ID NO: 2 achieve at least 37% reduction of APOE RNA in a standard in vitro assay. In certain embodiments, modified oligonucleotides complementary within nucleobases 1255-1295 of SEQ ID NO: 2 achieve an average of 70% reduction of APOE RNA in a standard in vitro assay.

### Nonlimiting Disclosure and Incorporation by Reference

[0692] Each of the literature and patent publications listed herein is incorporated by reference in its entirety.

[0693] While certain compounds, compositions and methods described herein have been described with specificity in accordance with certain embodiments, the following examples serve only to illustrate the compounds described herein and are not intended to limit the same. Each of the references, GenBank accession numbers, ENSEMBL identifiers, and the like recited in the present application is incorporated herein by reference in its entirety.

[0694] Although the sequence listing accompanying this filing identifies each sequence as either “RNA” or “DNA” as required, in reality, those sequences may be modified with any combination of chemical modifications. One of skill in the art will readily appreciate that such designation as “RNA” or “DNA” to describe modified oligonucleotides is, in certain instances, arbitrary. For example, an oligonucleotide comprising a nucleoside comprising a 2′-OH sugar moiety and a thymine base could be described as a DNA having a modified sugar (2′-OH in place of one 2′-H of DNA) or as an RNA having a modified base (thymine (methylated uracil) in place of an uracil of RNA). Accordingly, nucleic acid sequences provided herein, including, but not limited to those in the sequence listing, are intended to encompass nucleic acids containing any combination of natural or modified RNA and/or DNA, including, but not limited to such nucleic acids having modified nucleobases. By way of further example and without limitation, an oligomeric compound having the nucleobase sequence “ATCGATCG” encompasses any oligomeric compounds having such nucleobase sequence, whether modified or unmodified, including, but not limited to, such compounds comprising RNA bases, such as those having sequence “AUCGAUCG” and those having some DNA bases and some RNA bases such as “AUCGATCG” and oligomeric compounds having other modified nucleobases, such as “AT^{m}CGAUCG,” wherein ^{m}C indicates a cytosine base comprising a methyl group at the 5-position.

[0695] Certain compounds described herein (e.g., modified oligonucleotides) have one or more asymmetric center and thus give rise to enantiomers, diastereomers, and other stereoisomeric configurations that may be defined, in terms of absolute stereochemistry, as (R) or (S), as a or 13 such as for sugar anomers, or as (D) or (L), such as for amino acids, etc. Compounds provided herein that are drawn or described as having certain stereoisomeric configurations include only the indicated compounds. Compounds provided herein that are drawn or described with undefined stereochemistry include all such possible isomers, including their stereorandom and optically pure forms, unless specified otherwise. Likewise, tautomeric forms of the compounds herein are also included unless otherwise indicated. Unless otherwise indicated, compounds described herein are intended to include corresponding salt forms.

[0696] The compounds described herein include variations in which one or more atoms are replaced with a non-radioactive isotope or radioactive isotope of the indicated element. For example, compounds herein that comprise hydrogen atoms encompass all possible deuterium substitutions for each of the ¹H hydrogen atoms. Isotopic substitutions encompassed by the compounds herein include but are not limited to: ²H or ³H in place of ¹H, ¹³C or ¹⁴C in place of ¹²C, ¹⁵N in place of ¹⁴N, ¹⁷O or ¹⁸O in place of ¹⁶O, and ³³S, ³⁴S, ³⁵S, or ³⁶S in place of ³²S. In certain embodiments, non-radioactive isotopic substitutions may impart new properties on the oligomeric compound that are beneficial for use as a therapeutic or research tool. In certain embodiments, radioactive isotopic substitutions may make the compound suitable for research or diagnostic purposes such as imaging.

### EXAMPLES

[0697] The following examples illustrate certain embodiments of the present disclosure and are not limiting. Moreover, where specific embodiments are provided, the inventors have contemplated generic application of those specific embodiments. For example, disclosure of an oligonucleotide having a particular motif provides reasonable support for additional oligonucleotides having the same or similar motif. And, for example, where a particular high-affinity modification appears at a particular position, other high-affinity modifications at the same position are considered suitable, unless otherwise indicated.

### Example 1: Effect of 5-10-5 MOE Full Phosphorothioate Modified Oligonucleotides on Human APOE RNA In Vitro, Single Dose

[0698] Modified oligonucleotides complementary to human APOE nucleic acid were designed and tested for their single dose effects on APOE RNA in vitro. The modified oligonucleotides were tested in a series of experiments that had the same culture conditions.

[0699] The modified oligonucleotides in the table below are 5-10-5 MOE gapmers with full phosphorothioate internucleoside linkages. The gapmers are 20 nucleosides in length, wherein the central gap segment consists of ten 2′-β-D-deoxynucleosides, and wherein the 5′ and 3′ wing segments each consist of five 2′-MOE modified nucleosides. The sugar motif for the gapmers is (from 5′ to 3′): eeeeeddddddddddeeeee; wherein ‘d’ represents a 2′-β-D-deoxyribosyl sugar, and ‘e’ represents a 2′-MOE modified sugar moiety. The internucleoside linkage motif for the gapmers is (from 5′ to 3′): sssssssssssssssssss; wherein each ‘s’ represents a phosphorothioate internucleoside linkage. Each cytosine residue is a 5-methyl cytosine.

[0700] “Start site” indicates the 5′-most nucleoside to which the modified oligonucleotide is complementary in the target nucleic acid sequence. “Stop site” indicates the 3′-most nucleoside to which the modified oligonucleotide is complementary in the target nucleic acid sequence. Each modified oligonucleotide listed in the tables below is 100% complementary to SEQ ID NO: 1 (GENBANK Accession No. NC_000019.10, truncated from nucleotides 44903001 to 44912000), to SEQ ID NO: 2 (GENBANK Accession No. NM_001302688.1), to SEQ ID NO: 3 (GENBANK Accession No. AU126799.1), to SEQ ID NO: 4 (GENBANK Accession No. BI602495.1), to SEQ ID NO: 5 (the complement of GENBANK Accession No. CA306379.1), or to any combination of these SEQ ID NOs. ‘N/A’ indicates that the modified oligonucleotide is not 100% complementary to that particular target nucleic acid sequence.

[0701] Cultured HepG2 cells were treated with modified oligonucleotide at a concentration of 100 nM using Lipofectin at a density of 10,000 cells per well. After a treatment period of approximately 24 hours, total RNA was isolated from the cells and APOE RNA levels were measured by quantitative real-time RTPCR. APOE RNA levels were measured by human primer-probe set RTS3073 (forward sequence TGGGTCGCTTTTGGGATTAC, designated herein as SEQ ID NO: 10; reverse sequence CCATCAGCGCCCTCAGTT, designated herein as SEQ ID NO: 11; probe sequence CTGCTCAGCTCCCAGGTCACCCA, designated herein as SEQ ID NO: 12). APOE RNA levels were normalized to total RNA content, as measured by RIBOGREEN®. Results are presented in the tables below as percent APOE RNA relative to untreated control cells (% UTC). Each table represents results from an individual assay plate. The values marked with an “†” indicate that the modified oligonucleotide is complementary to the amplicon region of the primer probe set. Additional assays may be used to measure the potency and efficacy of the modified oligonucleotides complementary to the amplicon region.

TABLE 1
Reduction of APOE RNA by 5-10-5 MOE gapmers with full phosphorothioate internucleoside
linkages at a concentration of 100 nM in HepG2 cells plated at 10,000 cells per well

| | SEQ ID | SEQ ID | SEQ ID | SEQ ID | | | |
|---|---|---|---|---|---|---|---|
| | No: 1 | No: 1 | No: 2 | No: 2 | | APOE | |
| Compound | Start | Stop | Start | Stop | | (% | SEQ ID |
| Number | Site | Site | Site | Site | Sequence (5′ to 3′) | UTC) | NO |
| 425997 | 2782 | 2801 | 34 | 53 | GAGTAGGACTCAAGGATCCC | 108 | 20 |
| 425999 | 3625 | 3644 | 199 | 218 | GCAGCCCACAGAACCTTCAT | 122 | 21 |
| 426000 | 3628 | 3647 | 202 | 221 | AACGCAGCCCACAGAACCTT | 88 | 22 |
| 426001 | 3636 | 3655 | 210 | 229 | TGACCAGCAACGCAGCCCAC | 79 | 23 |
| 426002 | 3642 | 3661 | 216 | 235 | GGAATGTGACCAGCAACGCA | 66 | 24 |
| 426003 | 3649 | 3668 | 223 | 242 | CCTGCCAGGAATGTGACCAG | 26 | 25 |
| 426004 | N/A | N/A | 226 | 245 | CATCCTGCCAGGAATGTGAC | 72 | 26 |
| 426005 | N/A | N/A | 235 | 254 | TTGGCCTGGCATCCTGCCAG | 81 | 27 |
| 426006 | 4759 | 4778 | 241 | 260 | TCCACCTTGGCCTGGCATCC | 84 | 28 |
| 426007 | 4844 | 4863 | 326 | 345 | ACCCAGTGCCAGTTCCCAGC | 79† | 29 |
| 426008 | 4854 | 4873 | 336 | 355 | CCCAAAAGCGACCCAGTGCC | 73† | 30 |
| 426009 | 4861 | 4880 | 343 | 362 | AGGTAATCCCAAAAGCGACC | 60† | 31 |
| 426010 | 4864 | 4883 | 346 | 365 | CGCAGGTAATCCCAAAAGCG | 47† | 32 |
| 426011 | 4872 | 4891 | 354 | 373 | GCACCCAGCGCAGGTAATCC | 33† | 33 |
| 426012 | 4875 | 4894 | 357 | 376 | TCTGCACCCAGCGCAGGTAA | 53† | 34 |
| 426013 | 4879 | 4898 | 361 | 380 | AGTGTCTGCACCCAGCGCAG | 14† | 35 |
| 426014 | 4886 | 4905 | 368 | 387 | CTCAGACAGTGTCTGCACCC | 62† | 36 |
| 426015 | 4893 | 4912 | 375 | 394 | GCACCTGCTCAGACAGTGTC | 57† | 37 |
| 426016 | 4921 | 4940 | 403 | 422 | GTGACCTGGGAGCTGAGCAG | 42† | 38 |
| 426017 | 4932 | 4951 | 414 | 433 | TCAGTTCCTGGGTGACCTGG | 19† | 39 |
| 426018 | N/A | N/A | 419 | 438 | CGCCCTCAGTTCCTGGGTGA | 68† | 40 |
| 426019 | 5559 | 5578 | 461 | 480 | CGATTTGTAGGCCTTCAACT | 32 | 41 |
| 426020 | 5565 | 5584 | 467 | 486 | CAGTTCCGATTTGTAGGCCT | 25 | 42 |
| 426021 | 5618 | 5637 | 520 | 539 | TCCTTGGACAGCCGTGCCCG | 56 | 43 |
| 426022 | 5682 | 5701 | 584 | 603 | CTGCACCAGGCGGCCGCACA | 66 | 44 |
| 426023 | 5688 | 5707 | 590 | 609 | GCGGTACTGCACCAGGCGGC | 116 | 45 |
| 426024 | 5691 | 5710 | 593 | 612 | GCCGCGGTACTGCACCAGGC | 60 | 46 |
| 426025 | 5715 | 5734 | 617 | 636 | CTGGCCGAGCATGGCCTGCA | 96 | 47 |
| 426026 | 5765 | 5784 | 667 | 686 | CGCAGCTTGCGCAGGTGGGA | 82 | 48 |
| 426027 | 5775 | 5794 | 677 | 696 | GAGCCGCTTACGCAGCTTGC | 76 | 49 |
| 426028 | 5799 | 5818 | 701 | 720 | CTGCAGGTCATCGGCATCGC | 24 | 50 |
| 426029 | 5804 | 5823 | 706 | 725 | CGCTTCTGCAGGTCATCGGC | 35 | 51 |
| 426030 | 5825 | 5844 | 727 | 746 | CCGGCCTGGTACACTGCCAG | 75 | 52 |
| 426031 | 5828 | 5847 | 730 | 749 | GCCCCGGCCTGGTACACTGC | 70 | 53 |
| 426032 | 5832 | 5851 | 734 | 753 | GCGGGCCCCGGCCTGGTACA | 87 | 54 |
| 426033 | 5919 | 5938 | 821 | 840 | GCCCACAGTGGCGGCCCGCA | 84 | 55 |
| 426034 | 5922 | 5941 | 824 | 843 | GGAGCCCACAGTGGCGGCCC | 115 | 56 |
| 426035 | 5925 | 5944 | 827 | 846 | CAGGGAGCCCACAGTGGCGG | 106 | 57 |
| 426036 | 5928 | 5947 | 830 | 849 | GGCCAGGGAGCCCACAGTGG | 97 | 58 |
| 426037 | 5934 | 5953 | 836 | 855 | CTGGCCGGCCAGGGAGCCCA | 111 | 59 |
| 426038 | 6009 | 6028 | 911 | 930 | GCGGGTCCGGCTGCCCATCT | 61 | 60 |
| 426039 | 6062 | 6081 | 964 | 983 | TCCAGCTTGGCGCGCACCTC | 37 | 61 |
| 426040 | 6103 | 6122 | 1005 | 1024 | GGAAGGCCTCGGCCTGCAGG | 92 | 62 |
| 426041 | 6118 | 6137 | 1020 | 1039 | TCTTGAGGCGGGCCTGGAAG | 91 | 63 |
| 426042 | 6127 | 6146 | 1029 | 1048 | CGAACCAGCTCTTGAGGCGG | 117 | 64 |
| 426043 | 6150 | 6169 | 1052 | 1071 | CTGCATGTCTTCCACCAGGG | 37 | 65 |
| 426044 | 6153 | 6172 | 1055 | 1074 | GCGCTGCATGTCTTCCACCA | 50 | 66 |
| 426045 | 6197 | 6216 | 1099 | 1118 | GTGCCCACGGCAGCCTGCAC | 90 | 67 |
| 426046 | 6230 | 6249 | 1132 | 1151 | CAGTGATTGTCGCTGGGCAC | 136 | 68 |
| 426047 | 6234 | 6253 | 1136 | 1155 | CGTTCAGTGATTGTCGCTGG | 31 | 69 |
| 426048 | 6254 | 6273 | 1156 | 1175 | CGCATGGCTGCAGGCTTCGG | 5 | 70 |
| 426049 | 6257 | 6276 | 1159 | 1178 | GGTCGCATGGCTGCAGGCTT | 10 | 71 |
| 426050 | 6336 | 6355 | 1238 | 1257 | ACCCCAGGAGGACGGCTGGG | 32 | 72 |
| 426051 | 6340 | 6359 | 1242 | 1261 | GTCCACCCCAGGAGGACGGC | 69 | 73 |
| 426052 | 6343 | 6362 | 1245 | 1264 | AGGGTCCACCCCAGGAGGAC | 37 | 74 |
| 426053 | 6347 | 6366 | 1249 | 1268 | AACTAGGGTCCACCCCAGGA | 214 | 75 |
| 426054 | 6353 | 6372 | 1255 | 1274 | TTATTAAACTAGGGTCCACC | 56 | 76 |
| 426055 | 6371 | 6390 | 1273 | 1292 | GTGAAACTTGGTGAATCTTT | 30 | 77 |
| 426062 | 2888 | 2907 | 140 | 159 | CCCAGGGTCCCAGCTCTTTC | 163 | 78 |
| 426067 | 2892 | 2911 | 144 | 163 | GGTTCCCAGGGTCCCAGCTC | 87 | 79 |
| 426068 | 2912 | 2931 | N/A | N/A | GAGACTACCTGGAGGCCAGG | 96 | 80 |
| 426069 | 3167 | 3186 | N/A | N/A | ACCGTGTCGCTGCCCCTGGC | 99 | 81 |
| 426070 | 3656 | 3675 | N/A | N/A | CCCCATACCTGCCAGGAATG | 130 | 82 |
| 426071 | 4272 | 4291 | N/A | N/A | TGTGTGCCCCAGGCAGGGCT | 113 | 83 |
| 426072 | 4937 | 4956 | N/A | N/A | TCACCTCAGTTCCTGGGTGA | 91† | 84 |
| 426073 | 4976 | 4995 | N/A | N/A | GCCGCCCACCAGGAGGGTCA | 105† | 85 |
| 426074 | 7222 | 7241 | N/A | N/A | GCAGGCCGGGCTCGGAGCCC | 107 | 86 |

TABLE 2
Reduction of APOE RNA by 5-10-5 MOE gapmers with full phosphorothioate internucleoside
linkages at a concentration of 100 nM in HepG2 cells plated at 10,000 cells per well

| | SEQ | SEQ | SEQ | SEQ | SEQ | SEQ | | | |
|---|---|---|---|---|---|---|---|---|---|
| | ID No: | ID No: | ID No: | ID No: | ID No: | ID No: | | APOE | |
| Compound | 3 Start | 3 Stop | 4 Start | 4 Stop | 5 Start | 5 Stop | Sequence | (% | SEQ |
| Number | Site | Site | Site | Site | Site | Site | (5′ to 3′) | UTC) | ID NO |
| 425998 | 40 | 59 | N/A | N/A | N/A | N/A | TGTGATTGGC | 85 | 87 |
| | | | | | | | CAGTCGGCTC | | |
| 426056 | 103 | 122 | N/A | N/A | N/A | N/A | TGGCTGGCAT | 106 | 88 |
| | | | | | | | CCTGCCAGGA | | |
| 426057 | 534 | 553 | N/A | N/A | N/A | N/A | TACGCAGTTG | 123 | 89 |
| | | | | | | | CGCAGGTGGG | | |
| 426058 | 543 | 562 | N/A | N/A | N/A | N/A | AGGAGCCGTT | 109 | 90 |
| | | | | | | | ACGCAGTTGC | | |
| 426060 | 731 | 750 | N/A | N/A | N/A | N/A | ATTAAACTTA | 133 | 91 |
| | | | | | | | GGGTCCACTC | | |
| 426061 | 734 | 753 | N/A | N/A | N/A | N/A | TTTATTAAACT | 73 | 92 |
| | | | | | | | TAGGGTCCA | | |
| 426063 | N/A | N/A | 747 | 766 | N/A | N/A | TGTTCCACCA | 125 | 93 |
| | | | | | | | GGGCCCCAGG | | |
| 426064 | N/A | N/A | 777 | 796 | N/A | N/A | GGAGCCCACA | 135 | 94 |
| | | | | | | | GTGCCGGCCG | | |
| 426065 | N/A | N/A | N/A | N/A | 98 | 117 | CACTTCTGCA | 67 | 95 |
| | | | | | | | GGTCATCGGC | | |
| 426066 | N/A | N/A | N/A | N/A | 103 | 122 | CCAGGCACTT | 121 | 96 |
| | | | | | | | CTGCAGGTCA | | |

### Example 2: Effect of 5-8-5 MOE Mixed Backbone Modified Oligonucleotides on Human APOE RNA In Vitro, Single Dose

[0702] Modified oligonucleotides complementary to human APOE nucleic acid were designed and tested for their single dose effects on APOE RNA in vitro. The modified oligonucleotides were tested in a series of experiments that had similar culture conditions. The modified oligonucleotides in the tables below are 5-8-5 MOE gapmers with mixed PO/PS internucleoside linkages. The gapmers are 18 nucleosides in length, wherein the central gap segment consists of eight 2′-β-D-deoxynucleosides, and wherein the 5′ and 3′ wing segments each consist of five 2′-MOE modified nucleosides. The sugar motif for the gapmers is (from 5′ to 3′): eeeeeddddddddeeeee; wherein ‘d’ represents a 2′-β-D-deoxyribosyl sugar, and ‘e’ represents a 2′-MOE modified sugar moiety. The internucleoside linkage motif for the gapmers is (from 5′ to 3′): soossssssssssooss; wherein each ‘o’ represents a phosphodiester internucleoside linkage and each ‘s’ represents a phosphorothioate internucleoside linkage. Each cytosine residue is a 5-methyl cytosine.

[0703] “Start site” indicates the 5′-most nucleoside to which the modified oligonucleotide is complementary in the target nucleic acid sequence. “Stop site” indicates the 3′-most nucleoside to which the modified oligonucleotide is complementary in the target nucleic acid sequence. Each modified oligonucleotide listed in the tables below is 100% complementary to SEQ ID NO: 1 (described herein above), to SEQ ID NO: 2 (described herein above), to SEQ ID NO: 3 (described herein above), to SEQ ID NO: 4 (described herein above), to SEQ ID NO: 5 (described herein above), to SEQ ID NO: 6 (GENBANK Accession No. NM_000041.2 with T-->C at pos 471 to result in APOE4 mutant mRNA), or to any combination of these SEQ ID NOs. ‘N/A’ indicates that the modified oligonucleotide is not 100% complementary to that particular target nucleic acid sequence.

[0704] Cultured Hep3B or HepG2 cells were treated with modified oligonucleotide at a concentration of 2000 or 4000 nM by electroporation at a density of either 5,000 or 20,000 cells per well, as indicated in the tables below. After a treatment period of approximately 24 hours, total RNA was isolated from the cells and APOE RNA levels were measured by quantitative real-time RTPCR. APOE RNA levels were measured by human primer-probe set RTS3073 (described herein in Example 1). APOE RNA levels were normalized to total RNA content, as measured by RIBOGREEN®. Results are presented in the tables below as percent APOE RNA relative to untreated control cells (% UTC). Each table represents results from an individual assay plate. The values marked with an “†” indicate that the modified oligonucleotide is complementary to the amplicon region of the primer probe set. Additional assays may be used to measure the potency and efficacy of the modified oligonucleotides complementary to the amplicon region. In Tables 3-8 below, Compound 426048 (described herein above) was included as a reference.

TABLE 3
Reduction of APOE RNA by 5-8-5 MOE gapmers with mixed PO/PS internucleoside linkages
at a concentration of 4000 nM in Hep3B cells plated at 20,000 cells per well

| | SEQ ID | SEQ ID | SEQ ID | SEQ ID | | | |
|---|---|---|---|---|---|---|---|
| | No: 1 | No: 1 | No: 2 | No: 2 | | APOE | |
| Compound | Start | Stop | Start | Stop | | (% | SEQ ID |
| Number | Site | Site | Site | Site | Sequence (5′ to 3′) | UTC) | NO |
| 426048 | 6254 | 6273 | 1156 | 1175 | CGCATGGCTGCAGGCTTCGG | 42 | 70 |
| 688661 | 2783 | 2800 | 35 | 52 | AGTAGGACTCAAGGATCC | 103 | 97 |
| 688662 | 2785 | 2802 | 37 | 54 | TGAGTAGGACTCAAGGAT | 108 | 98 |
| 688663 | 2787 | 2804 | 39 | 56 | GCTGAGTAGGACTCAAGG | 108 | 99 |
| 688664 | 2789 | 2806 | 41 | 58 | GGGCTGAGTAGGACTCAA | 108 | 100 |
| 688665 | 2805 | 2822 | 57 | 74 | TCCTTCACCTCCGCTGGG | 120 | 101 |
| 688666 | 2807 | 2824 | 59 | 76 | CGTCCTTCACCTCCGCTG | 109 | 102 |
| 688671 | 3601 | 3618 | 175 | 192 | GCCTGTGATTGGCCAGTC | 92 | 103 |
| 688672 | 3603 | 3620 | 177 | 194 | CTGCCTGTGATTGGCCAG | 70 | 104 |
| 688673 | 3605 | 3622 | 179 | 196 | TCCTGCCTGTGATTGGCC | 96 | 105 |
| 688674 | 3607 | 3624 | 181 | 198 | CTTCCTGCCTGTGATTGG | 96 | 106 |
| 688675 | 3609 | 3626 | 183 | 200 | ATCTTCCTGCCTGTGATT | 100 | 107 |
| 688676 | 3613 | 3630 | 187 | 204 | CTTCATCTTCCTGCCTGT | 95 | 108 |
| 688677 | 3615 | 3632 | 189 | 206 | ACCTTCATCTTCCTGCCT | 110 | 109 |
| 688678 | 3617 | 3634 | 191 | 208 | GAACCTTCATCTTCCTGC | 93 | 110 |
| 688679 | 3619 | 3636 | 193 | 210 | CAGAACCTTCATCTTCCT | 96 | 111 |
| 688680 | 3621 | 3638 | 195 | 212 | CACAGAACCTTCATCTTC | 88 | 112 |
| 688681 | 3623 | 3640 | 197 | 214 | CCCACAGAACCTTCATCT | 78 | 113 |
| 688682 | 3625 | 3642 | 199 | 216 | AGCCCACAGAACCTTCAT | 80 | 114 |
| 688683 | 3627 | 3644 | 201 | 218 | GCAGCCCACAGAACCTTC | 101 | 115 |
| 688684 | 3629 | 3646 | 203 | 220 | ACGCAGCCCACAGAACCT | 97 | 116 |
| 688685 | 3631 | 3648 | 205 | 222 | CAACGCAGCCCACAGAAC | 102 | 117 |
| 688686 | 3633 | 3650 | 207 | 224 | AGCAACGCAGCCCACAGA | 94 | 118 |
| 688687 | 3635 | 3652 | 209 | 226 | CCAGCAACGCAGCCCACA | 68 | 119 |
| 688688 | 3637 | 3654 | 211 | 228 | GACCAGCAACGCAGCCCA | 80 | 120 |
| 688689 | 3639 | 3656 | 213 | 230 | GTGACCAGCAACGCAGCC | 109 | 121 |
| 688690 | 3641 | 3658 | 215 | 232 | ATGTGACCAGCAACGCAG | 113 | 122 |
| 688691 | 3645 | 3662 | 219 | 236 | AGGAATGTGACCAGCAAC | 93 | 123 |
| 688692 | 3647 | 3664 | 221 | 238 | CCAGGAATGTGACCAGCA | 100 | 124 |
| 688693 | 3649 | 3666 | 223 | 240 | TGCCAGGAATGTGACCAG | 105 | 125 |
| 688694 | 3651 | 3668 | 225 | 242 | CCTGCCAGGAATGTGACC | 123 | 126 |
| 688695 | N/A | N/A | 227 | 244 | ATCCTGCCAGGAATGTGA | 122 | 127 |
| 688696 | N/A | N/A | 229 | 246 | GCATCCTGCCAGGAATGT | 112 | 128 |
| 688697 | N/A | N/A | 231 | 248 | TGGCATCCTGCCAGGAAT | 112 | 129 |
| 688698 | N/A | N/A | 233 | 250 | CCTGGCATCCTGCCAGGA | 99 | 130 |
| 688699 | N/A | N/A | 235 | 252 | GGCCTGGCATCCTGCCAG | 90 | 131 |
| 688700 | 4757 | 4774 | 239 | 256 | CCTTGGCCTGGCATCCTG | 105 | 132 |
| 688701 | 4759 | 4776 | 241 | 258 | CACCTTGGCCTGGCATCC | 132 | 133 |
| 688702 | 4761 | 4778 | 243 | 260 | TCCACCTTGGCCTGGCAT | 132 | 134 |
| 688703 | 4763 | 4780 | 245 | 262 | GCTCCACCTTGGCCTGGC | 121 | 135 |
| 688704 | 4765 | 4782 | 247 | 264 | TTGCTCCACCTTGGCCTG | 112 | 136 |
| 688705 | 4767 | 4784 | 249 | 266 | GCTTGCTCCACCTTGGCC | 119 | 137 |
| 688706 | 4769 | 4786 | 251 | 268 | CCGCTTGCTCCACCTTGG | 111 | 138 |
| 688707 | 4773 | 4790 | 255 | 272 | TCCACCGCTTGCTCCACC | 118 | 139 |
| 688708 | 4775 | 4792 | 257 | 274 | TCTCCACCGCTTGCTCCA | 120 | 140 |
| 688709 | 4777 | 4794 | 259 | 276 | TGTCTCCACCGCTTGCTC | 155 | 141 |
| 688710 | 4779 | 4796 | 261 | 278 | TCTGTCTCCACCGCTTGC | 104 | 142 |
| 688711 | 4781 | 4798 | 263 | 280 | GCTCTGTCTCCACCGCTT | 53 | 143 |
| 688712 | 4783 | 4800 | 265 | 282 | CGGCTCTGTCTCCACCGC | 68 | 144 |
| 688713 | 4785 | 4802 | 267 | 284 | TCCGGCTCTGTCTCCACC | 81 | 145 |
| 688714 | 4787 | 4804 | 269 | 286 | GCTCCGGCTCTGTCTCCA | 71 | 146 |
| 688715 | 4791 | 4808 | 273 | 290 | TCGGGCTCCGGCTCTGTC | 110 | 147 |
| 688716 | 4794 | 4811 | 276 | 293 | AGCTCGGGCTCCGGCTCT | 83 | 148 |
| 688717 | 4796 | 4813 | 278 | 295 | GCAGCTCGGGCTCCGGCT | 88 | 149 |
| 688718 | 4798 | 4815 | 280 | 297 | GCGCAGCTCGGGCTCCGG | 134 | 150 |
| 688719 | 4800 | 4817 | 282 | 299 | TGGCGCAGCTCGGGCTCC | 90 | 151 |
| 688720 | 4802 | 4819 | 284 | 301 | GCTGGCGCAGCTCGGGCT | 98 | 152 |
| 688721 | 4804 | 4821 | 286 | 303 | CTGCTGGCGCAGCTCGGG | 86 | 153 |
| 688722 | 4806 | 4823 | 288 | 305 | GTCTGCTGGCGCAGCTCG | 113 | 154 |
| 688723 | 4808 | 4825 | 290 | 307 | CGGTCTGCTGGCGCAGCT | 97 | 155 |
| 688724 | 4810 | 4827 | 292 | 309 | CTCGGTCTGCTGGCGCAG | 103 | 156 |
| 688725 | 4812 | 4829 | 294 | 311 | CACTCGGTCTGCTGGCGC | 96 | 157 |
| 688726 | 4814 | 4831 | 296 | 313 | GCCACTCGGTCTGCTGGC | 100 | 158 |
| 688727 | 4816 | 4833 | 298 | 315 | CTGCCACTCGGTCTGCTG | 112 | 159 |
| 688728 | 4818 | 4835 | 300 | 317 | CTCTGCCACTCGGTCTGC | 75 | 160 |
| 688729 | 4820 | 4837 | 302 | 319 | CGCTCTGCCACTCGGTCT | 98 | 161 |
| 688730 | 4822 | 4839 | 304 | 321 | GCCGCTCTGCCACTCGGT | 86 | 162 |
| 688731 | 4824 | 4841 | 306 | 323 | TGGCCGCTCTGCCACTCG | 100 | 163 |
| 688732 | 4826 | 4843 | 308 | 325 | GCTGGCCGCTCTGCCACT | 109 | 164 |
| 688733 | 4828 | 4845 | 310 | 327 | GCGCTGGCCGCTCTGCCA | 125 | 165 |
| 688734 | 4842 | 4859 | 324 | 341 | AGTGCCAGTTCCCAGCGC | 127† | 166 |
| 688735 | 4844 | 4861 | 326 | 343 | CCAGTGCCAGTTCCCAGC | 136† | 167 |
| 688736 | 4848 | 4865 | 330 | 347 | CGACCCAGTGCCAGTTCC | 79† | 168 |
| 689014 | 6255 | 6272 | 1157 | 1174 | GCATGGCTGCAGGCTTCG | 38 | 169 |
| 689016 | 6258 | 6275 | 1160 | 1177 | GTCGCATGGCTGCAGGCT | 28 | 170 |

TABLE 4
Reduction of APOE RNA by 5-8-5 MOE gapmers with mixed PO/PS internucleoside linkages
at a concentration of 4000 nM in Hep3B cells plated at 20,000 cells per well

| | SEQ ID | SEQ ID | SEQ ID | SEQ ID | | | |
|---|---|---|---|---|---|---|---|
| | No: 1 | No: 1 | No: 2 | No: 2 | | APOE | |
| Compound | Start | Stop | Start | Stop | | (% | SEQ ID |
| Number | Site | Site | Site | Site | Sequence (5′ to 3′) | UTC) | NO |
| 426048 | 6254 | 6273 | 1156 | 1175 | CGCATGGCTGCAGGCTTCGG | 36 | 70 |
| 688737 | 4850 | 4867 | 332 | 349 | AGCGACCCAGTGCCAGTT | 42† | 171 |
| 688738 | 4852 | 4869 | 334 | 351 | AAAGCGACCCAGTGCCAG | 59† | 172 |
| 688739 | 4854 | 4871 | 336 | 353 | CAAAAGCGACCCAGTGCC | 60† | 173 |
| 688740 | 4856 | 4873 | 338 | 355 | CCCAAAAGCGACCCAGTG | 32† | 174 |
| 688741 | 4858 | 4875 | 340 | 357 | ATCCCAAAAGCGACCCAG | 39† | 175 |
| 688742 | 4860 | 4877 | 342 | 359 | TAATCCCAAAAGCGACCC | 51† | 176 |
| 688743 | 4862 | 4879 | 344 | 361 | GGTAATCCCAAAAGCGAC | 44† | 177 |
| 688744 | 4866 | 4883 | 348 | 365 | CGCAGGTAATCCCAAAAG | 31† | 178 |
| 688745 | 4868 | 4885 | 350 | 367 | AGCGCAGGTAATCCCAAA | 32† | 179 |
| 688746 | 4870 | 4887 | 352 | 369 | CCAGCGCAGGTAATCCCA | 17† | 180 |
| 688747 | 4872 | 4889 | 354 | 371 | ACCCAGCGCAGGTAATCC | 13† | 181 |
| 688748 | 4874 | 4891 | 356 | 373 | GCACCCAGCGCAGGTAAT | 43† | 182 |
| 688749 | 4876 | 4893 | 358 | 375 | CTGCACCCAGCGCAGGTA | 28† | 183 |
| 688750 | 4878 | 4895 | 360 | 377 | GTCTGCACCCAGCGCAGG | 24† | 184 |
| 688751 | 4881 | 4898 | 363 | 380 | AGTGTCTGCACCCAGCGC | 24† | 185 |
| 688752 | 4882 | 4899 | 364 | 381 | CAGTGTCTGCACCCAGCG | 41† | 186 |
| 688753 | 4884 | 4901 | 366 | 383 | GACAGTGTCTGCACCCAG | 42† | 187 |
| 688754 | 4886 | 4903 | 368 | 385 | CAGACAGTGTCTGCACCC | 81† | 188 |
| 688755 | 4888 | 4905 | 370 | 387 | CTCAGACAGTGTCTGCAC | 49† | 189 |
| 688756 | 4890 | 4907 | 372 | 389 | TGCTCAGACAGTGTCTGC | 57† | 190 |
| 688757 | 4894 | 4911 | 376 | 393 | CACCTGCTCAGACAGTGT | 43† | 191 |
| 688758 | 4896 | 4913 | 378 | 395 | TGCACCTGCTCAGACAGT | 40† | 192 |
| 688759 | 4898 | 4915 | 380 | 397 | CCTGCACCTGCTCAGACA | 12† | 193 |
| 688760 | 4900 | 4917 | 382 | 399 | CTCCTGCACCTGCTCAGA | 17† | 194 |
| 688761 | 4902 | 4919 | 384 | 401 | TCCTCCTGCACCTGCTCA | 11† | 195 |
| 688762 | 4904 | 4921 | 386 | 403 | GCTCCTCCTGCACCTGCT | 16† | 196 |
| 688763 | 4906 | 4923 | 388 | 405 | CAGCTCCTCCTGCACCTG | 13† | 197 |
| 688764 | 4908 | 4925 | 390 | 407 | AGCAGCTCCTCCTGCACC | 46† | 198 |
| 688765 | 4912 | 4929 | 394 | 411 | GCTGAGCAGCTCCTCCTG | 21† | 199 |
| 688766 | 4914 | 4931 | 396 | 413 | GAGCTGAGCAGCTCCTCC | 52† | 200 |
| 688767 | 4916 | 4933 | 398 | 415 | GGGAGCTGAGCAGCTCCT | 76† | 201 |
| 688768 | 4918 | 4935 | 400 | 417 | CTGGGAGCTGAGCAGCTC | 31† | 202 |
| 688769 | 4922 | 4939 | 404 | 421 | TGACCTGGGAGCTGAGCA | 51† | 203 |
| 688770 | 4924 | 4941 | 406 | 423 | GGTGACCTGGGAGCTGAG | 20† | 204 |
| 688771 | 4932 | 4949 | 414 | 431 | AGTTCCTGGGTGACCTGG | 43† | 205 |
| 688772 | 4934 | 4951 | 416 | 433 | TCAGTTCCTGGGTGACCT | 82† | 206 |
| 688773 | 4936 | 4953 | 418 | 435 | CCTCAGTTCCTGGGTGAC | 61† | 207 |
| 688774 | N/A | N/A | 420 | 437 | GCCCTCAGTTCCTGGGTG | 35† | 208 |
| 688775 | N/A | N/A | 422 | 439 | GCGCCCTCAGTTCCTGGG | 10† | 209 |
| 688776 | 5545 | 5562 | 447 | 464 | AACTCCTTCATGGTCTCG | 85 | 210 |
| 688777 | 5549 | 5566 | 451 | 468 | CTTCAACTCCTTCATGGT | 115 | 211 |
| 688778 | 5551 | 5568 | 453 | 470 | GCCTTCAACTCCTTCATG | 101 | 212 |
| 688779 | 5553 | 5570 | 455 | 472 | AGGCCTTCAACTCCTTCA | 67 | 213 |
| 688780 | 5555 | 5572 | 457 | 474 | GTAGGCCTTCAACTCCTT | 84 | 214 |
| 688781 | 5559 | 5576 | 461 | 478 | ATTTGTAGGCCTTCAACT | 72 | 215 |
| 688782 | 5561 | 5578 | 463 | 480 | CGATTTGTAGGCCTTCAA | 45 | 216 |
| 688783 | 5563 | 5580 | 465 | 482 | TCCGATTTGTAGGCCTTC | 51 | 217 |
| 688784 | 5565 | 5582 | 467 | 484 | GTTCCGATTTGTAGGCCT | 57 | 218 |
| 688785 | 5567 | 5584 | 469 | 486 | CAGTTCCGATTTGTAGGC | 98 | 219 |
| 688786 | 5569 | 5586 | 471 | 488 | TCCAGTTCCGATTTGTAG | 102 | 220 |
| 688787 | 5571 | 5588 | 473 | 490 | CCTCCAGTTCCGATTTGT | 51 | 221 |
| 688788 | 5573 | 5590 | 475 | 492 | TTCCTCCAGTTCCGATTT | 68 | 222 |
| 688789 | 5575 | 5592 | 477 | 494 | TGTTCCTCCAGTTCCGAT | 83 | 223 |
| 688790 | 5577 | 5594 | 479 | 496 | GTTGTTCCTCCAGTTCCG | 70 | 224 |
| 688791 | 5579 | 5596 | 481 | 498 | CAGTTGTTCCTCCAGTTC | 115 | 225 |
| 688792 | 5581 | 5598 | 483 | 500 | GTCAGTTGTTCCTCCAGT | 82 | 226 |
| 688793 | 5583 | 5600 | 485 | 502 | GGGTCAGTTGTTCCTCCA | 62 | 227 |
| 688794 | 5599 | 5616 | 501 | 518 | GTCTCCTCCGCCACCGGG | 89 | 228 |
| 688795 | 5616 | 5633 | 518 | 535 | TGGACAGCCGTGCCCGCG | 58 | 229 |
| 688796 | 5618 | 5635 | 520 | 537 | CTTGGACAGCCGTGCCCG | 79 | 230 |
| 688797 | 5620 | 5637 | 522 | 539 | TCCTTGGACAGCCGTGCC | 80 | 231 |
| 688798 | 5622 | 5639 | 524 | 541 | GCTCCTTGGACAGCCGTG | 58 | 232 |
| 688799 | 5624 | 5641 | 526 | 543 | CAGCTCCTTGGACAGCCG | 92 | 233 |
| 688800 | 5626 | 5643 | 528 | 545 | TGCAGCTCCTTGGACAGC | 80 | 234 |
| 688801 | 5628 | 5645 | 530 | 547 | CCTGCAGCTCCTTGGACA | 92 | 235 |
| 688802 | 5632 | 5649 | 534 | 551 | GCCGCCTGCAGCTCCTTG | 69 | 236 |
| 688803 | 5634 | 5651 | 536 | 553 | GCGCCGCCTGCAGCTCCT | 80 | 237 |
| 688804 | 5636 | 5653 | 538 | 555 | CTGCGCCGCCTGCAGCTC | 71 | 238 |
| 688805 | 5638 | 5655 | 540 | 557 | GCCTGCGCCGCCTGCAGC | 99 | 239 |
| 688806 | 5640 | 5657 | 542 | 559 | GGGCCTGCGCCGCCTGCA | 81 | 240 |
| 688807 | 5642 | 5659 | 544 | 561 | CCGGGCCTGCGCCGCCTG | 88 | 241 |
| 688808 | 5644 | 5661 | 546 | 563 | AGCCGGGCCTGCGCCGCC | 67 | 242 |
| 688809 | 5648 | 5665 | 550 | 567 | GCCCAGCCGGGCCTGCGC | 114 | 243 |
| 688810 | 5650 | 5667 | 552 | 569 | GCGCCCAGCCGGGCCTGC | 65 | 244 |
| 688811 | 5652 | 5669 | 554 | 571 | CCGCGCCCAGCCGGGCCT | 58 | 245 |
| 688812 | 5654 | 5671 | 556 | 573 | GTCCGCGCCCAGCCGGGC | 75 | 246 |
| 689014 | 6255 | 6272 | 1157 | 1174 | GCATGGCTGCAGGCTTCG | 44 | 169 |
| 689016 | 6258 | 6275 | 1160 | 1177 | GTCGCATGGCTGCAGGCT | 27 | 170 |

TABLE 5
Reduction of APOE RNA by 5-8-5 MOE gapmers with mixed PO/PS internucleoside linkages
at a concentration of 2000 nM in HepG2 cells plated at 20,000 cells per well

| | SEQ ID | SEQ ID | SEQ ID | SEQ ID | | | |
|---|---|---|---|---|---|---|---|
| | No: 1 | No: 1 | No: 2 | No: 2 | | APOE | |
| Compound | Start | Stop | Start | Stop | | (% | SEQ ID |
| Number | Site | Site | Site | Site | Sequence (5′ to 3′) | UTC) | NO |
| 426048 | 6254 | 6273 | 1156 | 1175 | CGCATGGCTGCAGGCTTCGG | 21 | 70 |
| 688813 | 5656 | 5673 | 558 | 575 | ATGTCCGCGCCCAGCCGG | 144 | 247 |
| 688814 | 5658 | 5675 | 560 | 577 | CCATGTCCGCGCCCAGCC | 112 | 248 |
| 688815 | 5660 | 5677 | 562 | 579 | CTCCATGTCCGCGCCCAG | 98 | 249 |
| 688816 | 5662 | 5679 | 564 | 581 | TCCTCCATGTCCGCGCCC | 102 | 250 |
| 688817 | 5664 | 5681 | 566 | 583 | CGTCCTCCATGTCCGCGC | 122 | 251 |
| 688818 | 5680 | 5697 | 582 | 599 | ACCAGGCGGCCGCACACG | 73 | 252 |
| 688819 | 5682 | 5699 | 584 | 601 | GCACCAGGCGGCCGCACA | 67 | 253 |
| 688820 | 5684 | 5701 | 586 | 603 | CTGCACCAGGCGGCCGCA | 126 | 254 |
| 688821 | 5686 | 5703 | 588 | 605 | TACTGCACCAGGCGGCCG | 131 | 255 |
| 688822 | 5688 | 5705 | 590 | 607 | GGTACTGCACCAGGCGGC | 119 | 256 |
| 688823 | 5690 | 5707 | 592 | 609 | GCGGTACTGCACCAGGCG | 108 | 257 |
| 688824 | 5692 | 5709 | 594 | 611 | CCGCGGTACTGCACCAGG | 89 | 258 |
| 688825 | 5694 | 5711 | 596 | 613 | CGCCGCGGTACTGCACCA | 79 | 259 |
| 688826 | 5698 | 5715 | 600 | 617 | ACCTCGCCGCGGTACTGC | 114 | 260 |
| 688827 | 5700 | 5717 | 602 | 619 | GCACCTCGCCGCGGTACT | 124 | 261 |
| 688828 | 5704 | 5721 | 606 | 623 | GCCTGCACCTCGCCGCGG | 110 | 262 |
| 688829 | 5706 | 5723 | 608 | 625 | TGGCCTGCACCTCGCCGC | 163 | 263 |
| 688830 | 5708 | 5725 | 610 | 627 | CATGGCCTGCACCTCGCC | 74 | 264 |
| 688831 | 5710 | 5727 | 612 | 629 | AGCATGGCCTGCACCTCG | 63 | 265 |
| 688832 | 5712 | 5729 | 614 | 631 | CGAGCATGGCCTGCACCT | 68 | 266 |
| 688833 | 5714 | 5731 | 616 | 633 | GCCGAGCATGGCCTGCAC | 86 | 267 |
| 688834 | 5716 | 5733 | 618 | 635 | TGGCCGAGCATGGCCTGC | 142 | 268 |
| 688835 | 5720 | 5737 | 622 | 639 | GCTCTGGCCGAGCATGGC | 112 | 269 |
| 688836 | 5722 | 5739 | 624 | 641 | GTGCTCTGGCCGAGCATG | 94 | 270 |
| 688837 | 5724 | 5741 | 626 | 643 | CGGTGCTCTGGCCGAGCA | 128 | 271 |
| 688838 | 5726 | 5743 | 628 | 645 | CTCGGTGCTCTGGCCGAG | 74 | 272 |
| 688839 | 5728 | 5745 | 630 | 647 | TCCTCGGTGCTCTGGCCG | 127 | 273 |
| 688840 | 5730 | 5747 | 632 | 649 | GCTCCTCGGTGCTCTGGC | 98 | 274 |
| 688841 | 5732 | 5749 | 634 | 651 | CAGCTCCTCGGTGCTCTG | 147 | 275 |
| 688842 | 5734 | 5751 | 636 | 653 | CGCAGCTCCTCGGTGCTC | 134 | 276 |
| 688843 | 5736 | 5753 | 638 | 655 | CCCGCAGCTCCTCGGTGC | 104 | 277 |
| 688844 | 5738 | 5755 | 640 | 657 | CACCCGCAGCTCCTCGGT | 92 | 278 |
| 688845 | 5740 | 5757 | 642 | 659 | CGCACCCGCAGCTCCTCG | 110 | 279 |
| 688846 | 5742 | 5759 | 644 | 661 | GGCGCACCCGCAGCTCCT | 84 | 280 |
| 688847 | 5744 | 5761 | 646 | 663 | GAGGCGCACCCGCAGCTC | 102 | 281 |
| 688848 | 5746 | 5763 | 648 | 665 | GCGAGGCGCACCCGCAGC | 61 | 282 |
| 688849 | 5748 | 5765 | 650 | 667 | AGGCGAGGCGCACCCGCA | 125 | 283 |
| 688850 | 5750 | 5767 | 652 | 669 | GGAGGCGAGGCGCACCCG | 93 | 284 |
| 688851 | 5752 | 5769 | 654 | 671 | TGGGAGGCGAGGCGCACC | 126 | 285 |
| 688852 | 5754 | 5771 | 656 | 673 | GGTGGGAGGCGAGGCGCA | 113 | 286 |
| 688853 | 5756 | 5773 | 658 | 675 | CAGGTGGGAGGCGAGGCG | 114 | 287 |
| 688854 | 5758 | 5775 | 660 | 677 | CGCAGGTGGGAGGCGAGG | 133 | 288 |
| 688855 | 5762 | 5779 | 664 | 681 | CTTGCGCAGGTGGGAGGC | 78 | 289 |
| 688856 | 5764 | 5781 | 666 | 683 | AGCTTGCGCAGGTGGGAG | 131 | 290 |
| 688857 | 5768 | 5785 | 670 | 687 | ACGCAGCTTGCGCAGGTG | 71 | 291 |
| 688858 | 5770 | 5787 | 672 | 689 | TTACGCAGCTTGCGCAGG | 120 | 292 |
| 688859 | 5772 | 5789 | 674 | 691 | GCTTACGCAGCTTGCGCA | 78 | 293 |
| 688860 | 5774 | 5791 | 676 | 693 | CCGCTTACGCAGCTTGCG | 143 | 294 |
| 688861 | 5776 | 5793 | 678 | 695 | AGCCGCTTACGCAGCTTG | 79 | 295 |
| 688862 | 5778 | 5795 | 680 | 697 | GGAGCCGCTTACGCAGCT | 131 | 296 |
| 688863 | 5782 | 5799 | 684 | 701 | CGGAGGAGCCGCTTACGC | 131 | 297 |
| 688864 | 5784 | 5801 | 686 | 703 | CGCGGAGGAGCCGCTTAC | 96 | 298 |
| 688865 | 5786 | 5803 | 688 | 705 | ATCGCGGAGGAGCCGCTT | 109 | 299 |
| 688866 | 5788 | 5805 | 690 | 707 | GCATCGCGGAGGAGCCGC | 107 | 300 |
| 688867 | 5790 | 5807 | 692 | 709 | CGGCATCGCGGAGGAGCC | 82 | 301 |
| 688868 | 5792 | 5809 | 694 | 711 | ATCGGCATCGCGGAGGAG | 122 | 302 |
| 688869 | 5796 | 5813 | 698 | 715 | GGTCATCGGCATCGCGGA | 131 | 303 |
| 688870 | 5798 | 5815 | 700 | 717 | CAGGTCATCGGCATCGCG | 104 | 304 |
| 688871 | 5801 | 5818 | 703 | 720 | CTGCAGGTCATCGGCATC | 123 | 305 |
| 688872 | 5802 | 5819 | 704 | 721 | TCTGCAGGTCATCGGCAT | 91 | 306 |
| 688873 | 5804 | 5821 | 706 | 723 | CTTCTGCAGGTCATCGGC | 102 | 307 |
| 688874 | 5806 | 5823 | 708 | 725 | CGCTTCTGCAGGTCATCG | 101 | 308 |
| 688875 | 5821 | 5838 | 723 | 740 | TGGTACACTGCCAGGCGC | 87 | 309 |
| 688876 | 5823 | 5840 | 725 | 742 | CCTGGTACACTGCCAGGC | 148 | 310 |
| 688877 | 5825 | 5842 | 727 | 744 | GGCCTGGTACACTGCCAG | 104 | 311 |
| 688878 | 5827 | 5844 | 729 | 746 | CCGGCCTGGTACACTGCC | 137 | 312 |
| 688879 | 5829 | 5846 | 731 | 748 | CCCCGGCCTGGTACACTG | 81 | 313 |
| 688880 | 5831 | 5848 | 733 | 750 | GGCCCCGGCCTGGTACAC | 81 | 314 |
| 688881 | 5833 | 5850 | 735 | 752 | CGGGCCCCGGCCTGGTAC | 87 | 315 |
| 688882 | 5835 | 5852 | 737 | 754 | CGCGGGCCCCGGCCTGGT | 104 | 316 |
| 688883 | 5837 | 5854 | 739 | 756 | CTCGCGGGCCCCGGCCTG | 105 | 317 |
| 688884 | 5839 | 5856 | 741 | 758 | CCCTCGCGGGCCCCGGCC | 126 | 318 |
| 688885 | 5841 | 5858 | 743 | 760 | CGCCCTCGCGGGCCCCGG | 88 | 319 |
| 688886 | 5856 | 5873 | 758 | 775 | TGAGGCCGCGCTCGGCGC | 62 | 320 |
| 688887 | 5858 | 5875 | 760 | 777 | GCTGAGGCCGCGCTCGGC | 100 | 321 |
| 688888 | 5860 | 5877 | 762 | 779 | GCGCTGAGGCCGCGCTCG | 87 | 322 |
| 689014 | 6255 | 6272 | 1157 | 1174 | GCATGGCTGCAGGCTTCG | 13 | 169 |
| 689016 | 6258 | 6275 | 1160 | 1177 | GTCGCATGGCTGCAGGCT | 15 | 170 |

TABLE 6
Reduction of APOE RNA by 5-8-5 MOE gapmers with mixed PO/PS internucleoside linkages
at a concentration of 2000 nM in HepG2 cells plated at 20,000 cells per well

| | SEQ ID | SEQ ID | SEQ ID | SEQ ID | | | |
|---|---|---|---|---|---|---|---|
| | No: 1 | No: 1 | No: 2 | No: 2 | | APOE | |
| Compound | Start | Stop | Start | Stop | | (% | SEQ ID |
| Number | Site | Site | Site | Site | Sequence (5′ to 3′) | UTC) | NO |
| 426048 | 6254 | 6273 | 1156 | 1175 | CGCATGGCTGCAGGCTTCGG | 23 | 70 |
| 688889 | 5898 | 5915 | 800 | 817 | GGCCCTGTTCCACCAGGG | 145 | 323 |
| 688890 | 5900 | 5917 | 802 | 819 | GCGGCCCTGTTCCACCAG | 149 | 324 |
| 688891 | 5902 | 5919 | 804 | 821 | ACGCGGCCCTGTTCCACC | 98 | 325 |
| 688892 | 5904 | 5921 | 806 | 823 | GCACGCGGCCCTGTTCCA | 107 | 326 |
| 688893 | 5906 | 5923 | 808 | 825 | CCGCACGCGGCCCTGTTC | 163 | 327 |
| 688894 | 5908 | 5925 | 810 | 827 | GCCCGCACGCGGCCCTGT | 128 | 328 |
| 688895 | 5910 | 5927 | 812 | 829 | CGGCCCGCACGCGGCCCT | 79 | 329 |
| 688896 | 5912 | 5929 | 814 | 831 | GGCGGCCCGCACGCGGCC | 103 | 330 |
| 688897 | 5914 | 5931 | 816 | 833 | GTGGCGGCCCGCACGCGG | 118 | 331 |
| 688898 | 5916 | 5933 | 818 | 835 | CAGTGGCGGCCCGCACGC | 143 | 332 |
| 688899 | 5918 | 5935 | 820 | 837 | CACAGTGGCGGCCCGCAC | 97 | 333 |
| 688900 | 5920 | 5937 | 822 | 839 | CCCACAGTGGCGGCCCGC | 65 | 334 |
| 688901 | 5922 | 5939 | 824 | 841 | AGCCCACAGTGGCGGCCC | 96 | 335 |
| 688902 | 5924 | 5941 | 826 | 843 | GGAGCCCACAGTGGCGGC | 92 | 336 |
| 688903 | 5928 | 5945 | 830 | 847 | CCAGGGAGCCCACAGTGG | 87 | 337 |
| 688904 | 5930 | 5947 | 832 | 849 | GGCCAGGGAGCCCACAGT | 114 | 338 |
| 688905 | 5932 | 5949 | 834 | 851 | CCGGCCAGGGAGCCCACA | 125 | 339 |
| 688906 | 5934 | 5951 | 836 | 853 | GGCCGGCCAGGGAGCCCA | 72 | 340 |
| 688907 | 5936 | 5953 | 838 | 855 | CTGGCCGGCCAGGGAGCC | 128 | 341 |
| 688908 | 5938 | 5955 | 840 | 857 | GGCTGGCCGGCCAGGGAG | 95 | 342 |
| 688909 | 5941 | 5958 | 843 | 860 | AGCGGCTGGCCGGCCAGG | 64 | 343 |
| 688910 | 5943 | 5960 | 845 | 862 | GTAGCGGCTGGCCGGCCA | 105 | 344 |
| 688911 | 5945 | 5962 | 847 | 864 | CTGTAGCGGCTGGCCGGC | 117 | 345 |
| 688912 | 5947 | 5964 | 849 | 866 | TCCTGTAGCGGCTGGCCG | 110 | 346 |
| 688913 | 5949 | 5966 | 851 | 868 | GCTCCTGTAGCGGCTGGC | 63 | 347 |
| 688914 | 5951 | 5968 | 853 | 870 | CCGCTCCTGTAGCGGCTG | 109 | 348 |
| 688915 | 5955 | 5972 | 857 | 874 | GGGCCCGCTCCTGTAGCG | 90 | 349 |
| 688916 | 5957 | 5974 | 859 | 876 | CTGGGCCCGCTCCTGTAG | 148 | 350 |
| 688917 | 5959 | 5976 | 861 | 878 | GCCTGGGCCCGCTCCTGT | 98 | 351 |
| 688918 | 5961 | 5978 | 863 | 880 | AGGCCTGGGCCCGCTCCT | 111 | 352 |
| 688919 | 5963 | 5980 | 865 | 882 | CCAGGCCTGGGCCCGCTC | 137 | 353 |
| 688920 | 5965 | 5982 | 867 | 884 | CCCCAGGCCTGGGCCCGC | 111 | 354 |
| 688921 | 5967 | 5984 | 869 | 886 | CGCCCCAGGCCTGGGCCC | 102 | 355 |
| 688922 | 5971 | 5988 | 873 | 890 | CGCTCGCCCCAGGCCTGG | 117 | 356 |
| 688923 | 5973 | 5990 | 875 | 892 | GCCGCTCGCCCCAGGCCT | 90 | 357 |
| 688924 | 5975 | 5992 | 877 | 894 | CAGCCGCTCGCCCCAGGC | 108 | 358 |
| 688925 | 5977 | 5994 | 879 | 896 | CGCAGCCGCTCGCCCCAG | 108 | 359 |
| 688926 | 5979 | 5996 | 881 | 898 | CGCGCAGCCGCTCGCCCC | 63 | 360 |
| 688927 | 5981 | 5998 | 883 | 900 | CGCGCGCAGCCGCTCGCC | 129 | 361 |
| 688928 | 5983 | 6000 | 885 | 902 | CGCGCGCGCAGCCGCTCG | 102 | 362 |
| 688929 | 5985 | 6002 | 887 | 904 | TCCGCGCGCGCAGCCGCT | 67 | 363 |
| 688930 | 5987 | 6004 | 889 | 906 | CATCCGCGCGCGCAGCCG | 74 | 364 |
| 688931 | 5989 | 6006 | 891 | 908 | TCCATCCGCGCGCGCAGC | 106 | 365 |
| 688932 | 5991 | 6008 | 893 | 910 | CCTCCATCCGCGCGCGCA | 119 | 366 |
| 688933 | 5993 | 6010 | 895 | 912 | CTCCTCCATCCGCGCGCG | 104 | 367 |
| 688934 | 5995 | 6012 | 897 | 914 | ATCTCCTCCATCCGCGCG | 118 | 368 |
| 688935 | 5997 | 6014 | 899 | 916 | CCATCTCCTCCATCCGCG | 114 | 369 |
| 688936 | 5999 | 6016 | 901 | 918 | GCCCATCTCCTCCATCCG | 103 | 370 |
| 688937 | 6003 | 6020 | 905 | 922 | GGCTGCCCATCTCCTCCA | 101 | 371 |
| 688938 | 6005 | 6022 | 907 | 924 | CCGGCTGCCCATCTCCTC | 83 | 372 |
| 688939 | 6007 | 6024 | 909 | 926 | GTCCGGCTGCCCATCTCC | 68 | 373 |
| 688940 | 6009 | 6026 | 911 | 928 | GGGTCCGGCTGCCCATCT | 101 | 374 |
| 688941 | 6011 | 6028 | 913 | 930 | GCGGGTCCGGCTGCCCAT | 106 | 375 |
| 688942 | 6013 | 6030 | 915 | 932 | TCGCGGGTCCGGCTGCCC | 133 | 376 |
| 688943 | 6015 | 6032 | 917 | 934 | GGTCGCGGGTCCGGCTGC | 134 | 377 |
| 688944 | 6017 | 6034 | 919 | 936 | GCGGTCGCGGGTCCGGCT | 88 | 378 |
| 688945 | 6019 | 6036 | 921 | 938 | AGGCGGTCGCGGGTCCGG | 105 | 379 |
| 688946 | 6021 | 6038 | 923 | 940 | CCAGGCGGTCGCGGGTCC | 102 | 380 |
| 688947 | 6023 | 6040 | 925 | 942 | GTCCAGGCGGTCGCGGGT | 64 | 381 |
| 688948 | 6040 | 6057 | 942 | 959 | ACCTGCTCCTTCACCTCG | 94 | 382 |
| 688949 | 6042 | 6059 | 944 | 961 | CCACCTGCTCCTTCACCT | 129 | 383 |
| 688950 | 6044 | 6061 | 946 | 963 | CGCCACCTGCTCCTTCAC | 99 | 384 |
| 688951 | 6046 | 6063 | 948 | 965 | TCCGCCACCTGCTCCTTC | 168 | 385 |
| 688952 | 6048 | 6065 | 950 | 967 | CCTCCGCCACCTGCTCCT | 69 | 386 |
| 688953 | 6050 | 6067 | 952 | 969 | CACCTCCGCCACCTGCTC | 130 | 387 |
| 688954 | 6052 | 6069 | 954 | 971 | CGCACCTCCGCCACCTGC | 59 | 388 |
| 688955 | 6054 | 6071 | 956 | 973 | CGCGCACCTCCGCCACCT | 88 | 389 |
| 688956 | 6056 | 6073 | 958 | 975 | GGCGCGCACCTCCGCCAC | 86 | 390 |
| 688957 | 6058 | 6075 | 960 | 977 | TTGGCGCGCACCTCCGCC | 122 | 391 |
| 688958 | 6060 | 6077 | 962 | 979 | GCTTGGCGCGCACCTCCG | 115 | 392 |
| 688959 | 6062 | 6079 | 964 | 981 | CAGCTTGGCGCGCACCTC | 83 | 393 |
| 688960 | 6066 | 6083 | 968 | 985 | CCTCCAGCTTGGCGCGCA | 138 | 394 |
| 688961 | 6068 | 6085 | 970 | 987 | CTCCTCCAGCTTGGCGCG | 53 | 395 |
| 688962 | 6070 | 6087 | 972 | 989 | TGCTCCTCCAGCTTGGCG | 83 | 396 |
| 688963 | 6072 | 6089 | 974 | 991 | CCTGCTCCTCCAGCTTGG | 55 | 397 |
| 688964 | 6074 | 6091 | 976 | 993 | GGCCTGCTCCTCCAGCTT | 84 | 398 |
| 689014 | 6255 | 6272 | 1157 | 1174 | GCATGGCTGCAGGCTTCG | 21 | 169 |
| 689016 | 6258 | 6275 | 1160 | 1177 | GTCGCATGGCTGCAGGCT | 21 | 170 |

TABLE 7
Reduction of APOE RNA by 5-8-5 MOE gapmers with mixed PO/PS internucleoside linkages
at a concentration of 2000 nM in Hep3B cells plated at 20,000 cells per well

| | SEQ ID | SEQ ID | SEQ ID | SEQ ID | | | |
|---|---|---|---|---|---|---|---|
| | No: 1 | No: 1 | No: 2 | No: 2 | | APOE | |
| Compound | Start | Stop | Start | Stop | | (% | SEQ ID |
| Number | Site | Site | Site | Site | Sequence (5′ to 3′) | UTC) | NO |
| 426048 | 6254 | 6273 | 1156 | 1175 | CGCATGGCTGCAGGCTTCGG | 19 | 70 |
| 688965 | 6076 | 6093 | 978 | 995 | TGGGCCTGCTCCTCCAGC | 92 | 399 |
| 688966 | 6078 | 6095 | 980 | 997 | GCTGGGCCTGCTCCTCCA | 76 | 400 |
| 688967 | 6080 | 6097 | 982 | 999 | CTGCTGGGCCTGCTCCTC | 90 | 401 |
| 688968 | 6082 | 6099 | 984 | 1001 | ATCTGCTGGGCCTGCTCC | 90 | 402 |
| 688969 | 6084 | 6101 | 986 | 1003 | GTATCTGCTGGGCCTGCT | 79 | 403 |
| 688970 | 6101 | 6118 | 1003 | 1020 | GGCCTCGGCCTGCAGGCG | 84 | 404 |
| 688971 | 6103 | 6120 | 1005 | 1022 | AAGGCCTCGGCCTGCAGG | 92 | 405 |
| 688972 | 6105 | 6122 | 1007 | 1024 | GGAAGGCCTCGGCCTGCA | 96 | 406 |
| 688973 | 6107 | 6124 | 1009 | 1026 | CTGGAAGGCCTCGGCCTG | 88 | 407 |
| 688974 | 6109 | 6126 | 1011 | 1028 | GCCTGGAAGGCCTCGGCC | 78 | 408 |
| 688975 | 6111 | 6128 | 1013 | 1030 | GGGCCTGGAAGGCCTCGG | 82 | 409 |
| 688976 | 6113 | 6130 | 1015 | 1032 | GCGGGCCTGGAAGGCCTC | 75 | 410 |
| 688977 | 6115 | 6132 | 1017 | 1034 | AGGCGGGCCTGGAAGGCC | 77 | 411 |
| 688978 | 6117 | 6134 | 1019 | 1036 | TGAGGCGGGCCTGGAAGG | 81 | 412 |
| 688979 | 6119 | 6136 | 1021 | 1038 | CTTGAGGCGGGCCTGGAA | 79 | 413 |
| 688980 | 6123 | 6140 | 1025 | 1042 | AGCTCTTGAGGCGGGCCT | 78 | 414 |
| 688981 | 6125 | 6142 | 1027 | 1044 | CCAGCTCTTGAGGCGGGC | 84 | 415 |
| 688982 | 6127 | 6144 | 1029 | 1046 | AACCAGCTCTTGAGGCGG | 85 | 416 |
| 688983 | 6129 | 6146 | 1031 | 1048 | CGAACCAGCTCTTGAGGC | 117 | 417 |
| 688984 | 6131 | 6148 | 1033 | 1050 | CTCGAACCAGCTCTTGAG | 66 | 418 |
| 688985 | 6133 | 6150 | 1035 | 1052 | GGCTCGAACCAGCTCTTG | 76 | 419 |
| 688986 | 6150 | 6167 | 1052 | 1069 | GCATGTCTTCCACCAGGG | 72 | 420 |
| 688987 | 6152 | 6169 | 1054 | 1071 | CTGCATGTCTTCCACCAG | 80 | 421 |
| 688988 | 6154 | 6171 | 1056 | 1073 | CGCTGCATGTCTTCCACC | 69 | 422 |
| 688989 | 6169 | 6186 | 1071 | 1088 | AGCCCGGCCCACTGGCGC | 76 | 423 |
| 688990 | 6171 | 6188 | 1073 | 1090 | CCAGCCCGGCCCACTGGC | 82 | 424 |
| 688991 | 6173 | 6190 | 1075 | 1092 | CACCAGCCCGGCCCACTG | 74 | 425 |
| 688992 | 6175 | 6192 | 1077 | 1094 | TCCACCAGCCCGGCCCAC | 108 | 426 |
| 688993 | 6177 | 6194 | 1079 | 1096 | TCTCCACCAGCCCGGCCC | 223 | 427 |
| 688994 | 6179 | 6196 | 1081 | 1098 | CTTCTCCACCAGCCCGGC | 75 | 428 |
| 688995 | 6181 | 6198 | 1083 | 1100 | ACCTTCTCCACCAGCCCG | 101 | 429 |
| 688996 | 6185 | 6202 | 1087 | 1104 | CTGCACCTTCTCCACCAG | 99 | 430 |
| 688997 | 6187 | 6204 | 1089 | 1106 | GCCTGCACCTTCTCCACC | 89 | 431 |
| 688998 | 6189 | 6206 | 1091 | 1108 | CAGCCTGCACCTTCTCCA | 80 | 432 |
| 688999 | 6191 | 6208 | 1093 | 1110 | GGCAGCCTGCACCTTCTC | 57 | 433 |
| 689000 | 6193 | 6210 | 1095 | 1112 | ACGGCAGCCTGCACCTTC | 90 | 434 |
| 689001 | 6195 | 6212 | 1097 | 1114 | CCACGGCAGCCTGCACCT | 74 | 435 |
| 689002 | 6197 | 6214 | 1099 | 1116 | GCCCACGGCAGCCTGCAC | 93 | 436 |
| 689003 | 6199 | 6216 | 1101 | 1118 | GTGCCCACGGCAGCCTGC | 51 | 437 |
| 689004 | 6201 | 6218 | 1103 | 1120 | TGGTGCCCACGGCAGCCT | 79 | 438 |
| 689005 | 6203 | 6220 | 1105 | 1122 | GCTGGTGCCCACGGCAGC | 78 | 439 |
| 689006 | 6205 | 6222 | 1107 | 1124 | GCGCTGGTGCCCACGGCA | 61 | 440 |
| 689007 | 6227 | 6244 | 1129 | 1146 | ATTGTCGCTGGGCACAGG | 88 | 441 |
| 689008 | 6229 | 6246 | 1131 | 1148 | TGATTGTCGCTGGGCACA | 83 | 442 |
| 689009 | 6231 | 6248 | 1133 | 1150 | AGTGATTGTCGCTGGGCA | 56 | 443 |
| 689010 | 6233 | 6250 | 1135 | 1152 | TCAGTGATTGTCGCTGGG | 100 | 444 |
| 689011 | 6235 | 6252 | 1137 | 1154 | GTTCAGTGATTGTCGCTG | 91 | 445 |
| 689012 | 6252 | 6269 | 1154 | 1171 | TGGCTGCAGGCTTCGGCG | 72 | 446 |
| 689013 | 6254 | 6271 | 1156 | 1173 | CATGGCTGCAGGCTTCGG | 32 | 447 |
| 689014 | 6255 | 6272 | 1157 | 1174 | GCATGGCTGCAGGCTTCG | 50 | 169 |
| 689015 | 6257 | 6274 | 1159 | 1176 | TCGCATGGCTGCAGGCTT | 19 | 448 |
| 689016 | 6258 | 6275 | 1160 | 1177 | GTCGCATGGCTGCAGGCT | 33 | 170 |
| 689017 | 6260 | 6277 | 1162 | 1179 | GGGTCGCATGGCTGCAGG | 41 | 449 |
| 689018 | 6286 | 6303 | 1188 | 1205 | GGAGGCAGGAGGCACGGG | 91 | 450 |
| 689019 | 6288 | 6305 | 1190 | 1207 | GCGGAGGCAGGAGGCACG | 82 | 451 |
| 689020 | 6290 | 6307 | 1192 | 1209 | GCGCGGAGGCAGGAGGCA | 65 | 452 |
| 689021 | 6292 | 6309 | 1194 | 1211 | CTGCGCGGAGGCAGGAGG | 69 | 453 |
| 689022 | 6294 | 6311 | 1196 | 1213 | GGCTGCGCGGAGGCAGGA | 86 | 454 |
| 689023 | 6296 | 6313 | 1198 | 1215 | CAGGCTGCGCGGAGGCAG | 56 | 455 |
| 689024 | 6298 | 6315 | 1200 | 1217 | TGCAGGCTGCGCGGAGGC | 92 | 456 |
| 689025 | 6300 | 6317 | 1202 | 1219 | GCTGCAGGCTGCGCGGAG | 75 | 457 |
| 689026 | 6302 | 6319 | 1204 | 1221 | CCGCTGCAGGCTGCGCGG | 78 | 458 |
| 689027 | 6304 | 6321 | 1206 | 1223 | TCCCGCTGCAGGCTGCGC | 53 | 459 |
| 689028 | 6306 | 6323 | 1208 | 1225 | TCTCCCGCTGCAGGCTGC | 37 | 460 |
| 689029 | 6308 | 6325 | 1210 | 1227 | GGTCTCCCGCTGCAGGCT | 42 | 461 |
| 689030 | 6310 | 6327 | 1212 | 1229 | AGGGTCTCCCGCTGCAGG | 70 | 462 |
| 689031 | 6312 | 6329 | 1214 | 1231 | ACAGGGTCTCCCGCTGCA | 68 | 463 |
| 689032 | 6314 | 6331 | 1216 | 1233 | GGACAGGGTCTCCCGCTG | 61 | 464 |
| 689033 | 6336 | 6353 | 1238 | 1255 | CCCAGGAGGACGGCTGGG | 86 | 465 |
| 689034 | 6338 | 6355 | 1240 | 1257 | ACCCCAGGAGGACGGCTG | 105 | 466 |
| 689035 | 6340 | 6357 | 1242 | 1259 | CCACCCCAGGAGGACGGC | 80 | 467 |
| 689036 | 6342 | 6359 | 1244 | 1261 | GTCCACCCCAGGAGGACG | 82 | 468 |
| 689037 | 6344 | 6361 | 1246 | 1263 | GGGTCCACCCCAGGAGGA | 97 | 469 |
| 689038 | 6346 | 6363 | 1248 | 1265 | TAGGGTCCACCCCAGGAG | 66 | 470 |
| 689039 | 6348 | 6365 | 1250 | 1267 | ACTAGGGTCCACCCCAGG | 79 | 471 |
| 689040 | 6352 | 6369 | 1254 | 1271 | TTAAACTAGGGTCCACCC | 61 | 472 |
| 689041 | 6354 | 6371 | 1256 | 1273 | TATTAAACTAGGGTCCAC | 79 | 473 |
| 689042 | 6356 | 6373 | 1258 | 1275 | TTTATTAAACTAGGGTCC | 58 | 474 |

TABLE 8
Reduction of APOE RNA by 5-8-5 MOE gapmers with mixed PO/PS internucleoside linkages
at a concentration of 2000 nM in HepG2 cells plated at 20,000 cells per well

| | SEQ ID | SEQ ID | SEQ ID | SEQ ID | | | |
|---|---|---|---|---|---|---|---|
| | No: 1 | No: 1 | No: 2 | No: 2 | | APOE | |
| Compound | Start | Stop | Start | Stop | | (% | SEQ ID |
| Number | Site | Site | Site | Site | Sequence (5′ to 3′) | UTC) | NO |
| 426048 | 6254 | 6273 | 1156 | 1175 | CGCATGGCTGCAGGCTTCGG | 37 | 70 |
| 689014 | 6255 | 6272 | 1157 | 1174 | GCATGGCTGCAGGCTTCG | 33 | 169 |
| 689016 | 6258 | 6275 | 1160 | 1177 | GTCGCATGGCTGCAGGCT | 14 | 170 |
| 689043 | 6358 | 6375 | 1260 | 1277 | TCTTTATTAAACTAGGGT | 23 | 475 |
| 689044 | 6360 | 6377 | 1262 | 1279 | AATCTTTATTAAACTAGG | 39 | 476 |
| 689045 | 6362 | 6379 | 1264 | 1281 | TGAATCTTTATTAAACTA | 103 | 477 |
| 689046 | 6364 | 6381 | 1266 | 1283 | GGTGAATCTTTATTAAAC | 12 | 478 |
| 689047 | 6366 | 6383 | 1268 | 1285 | TTGGTGAATCTTTATTAA | 33 | 479 |
| 689048 | 6368 | 6385 | 1270 | 1287 | ACTTGGTGAATCTTTATT | 28 | 480 |
| 689049 | 6370 | 6387 | 1272 | 1289 | AAACTTGGTGAATCTTTA | 41 | 481 |
| 689050 | 6372 | 6389 | 1274 | 1291 | TGAAACTTGGTGAATCTT | 29 | 482 |
| 689051 | 6374 | 6391 | 1276 | 1293 | CGTGAAACTTGGTGAATC | 22 | 483 |
| 689052 | 3652 | 3669 | N/A | N/A | ACCTGCCAGGAATGTGAC | 113 | 484 |
| 689053 | 3667 | 3684 | N/A | N/A | AAGCCCCGCCCCCATACC | 69 | 485 |
| 689054 | 3708 | 3725 | N/A | N/A | TGAGGTGAGGATGAGAGG | 101 | 486 |
| 689055 | 3737 | 3754 | N/A | N/A | CAGGGTCTGCCTGAATGG | 101 | 487 |
| 689056 | 3759 | 3776 | N/A | N/A | AGAAGCCTCAGAAGAGGG | 116 | 488 |
| 689057 | 3774 | 3791 | N/A | N/A | GCCAGGAAGCAGCACAGA | 130 | 489 |
| 689058 | 3789 | 3806 | N/A | N/A | AAATCGCTGTTCAGAGCC | 107 | 490 |
| 689059 | 3809 | 3826 | N/A | N/A | ACCGAGGCCCAGAGAGCG | 128 | 491 |
| 689060 | 3831 | 3848 | N/A | N/A | TCCTATCTCAAGGATGGG | 125 | 492 |
| 689061 | 3846 | 3863 | N/A | N/A | AAAACAACTTCTAACTCC | 102 | 493 |
| 689062 | 4119 | 4136 | N/A | N/A | TCGAAACGGGCAGATCAC | 56 | 494 |
| 689063 | 4172 | 4189 | N/A | N/A | AACTCCCAGCCAGGTGCG | 117 | 495 |
| 689064 | 4187 | 4204 | N/A | N/A | GCATTAGAAACCTCTAAC | 101 | 496 |
| 689065 | 4202 | 4219 | N/A | N/A | CTATCTGCCTGCAATGCA | 82 | 497 |
| 689066 | 4232 | 4249 | N/A | N/A | AGATCACAGCTGCCCCGT | 109 | 498 |
| 689067 | 4247 | 4264 | N/A | N/A | GGTGATGGAGAATAAAGA | 118 | 499 |
| 689068 | 4266 | 4283 | N/A | N/A | CCAGGCAGGGCTGTGTGG | 89 | 500 |
| 689069 | 4281 | 4298 | N/A | N/A | GTGTCCTTGTGTGCCCCA | 54 | 501 |
| 689070 | 4296 | 4313 | N/A | N/A | AAAAGCATGTATTGAGTG | 56 | 502 |
| 689071 | 4460 | 4477 | N/A | N/A | GCACAGGTGTGTGGCACC | 70 | 503 |
| 689072 | 4536 | 4553 | N/A | N/A | CTGAACATGGTTCACTGC | 103 | 504 |
| 689073 | 4586 | 4603 | N/A | N/A | GTATTTATAAACAGGGTC | 96 | 505 |
| 689074 | 4601 | 4618 | N/A | N/A | CTTGGAAAGCATTATGTA | 130 | 506 |
| 689075 | 4616 | 4633 | N/A | N/A | GAGTCGGTTTAATCACTT | 85 | 507 |
| 689076 | 4643 | 4660 | N/A | N/A | GGAGCCATGGTGGGCAGG | 69 | 508 |
| 689077 | 4658 | 4675 | N/A | N/A | CACAAATGCTTCTTTGGA | 68 | 509 |
| 689078 | 4673 | 4690 | N/A | N/A | ACACAGAAGGTGCTCCAC | 111 | 510 |
| 689079 | 4693 | 4710 | N/A | N/A | GGCATCTAGTACCTAGGG | 81 | 511 |
| 689080 | 4708 | 4725 | N/A | N/A | TTCTGACCCCGTCCAGGC | 65 | 512 |
| 689081 | 4730 | 4747 | N/A | N/A | AGTTCAAGGTGGGTCAGG | 83 | 513 |
| 689082 | 4745 | 4762 | N/A | N/A | ATCCTGTGTGGAACAAGT | 77 | 514 |
| 689083 | 4937 | 4954 | N/A | N/A | ACCTCAGTTCCTGGGTGA | 76† | 515 |
| 689084 | 4963 | 4980 | N/A | N/A | GGTCAAGGGCCAGGATGG | 93† | 516 |
| 689085 | 4978 | 4995 | N/A | N/A | GCCGCCCACCAGGAGGGT | 132† | 517 |
| 689086 | 5004 | 5021 | N/A | N/A | ATGAAACCTGGACCTGGG | 126† | 518 |
| 689087 | 5027 | 5044 | N/A | N/A | CAAGACTTAGCGACAGGG | 110† | 519 |
| 689088 | 5042 | 5059 | N/A | N/A | GAGACCCAGGCCCCCCAA | 120† | 520 |
| 689089 | 5057 | 5074 | N/A | N/A | AAGCTAGAACCAGCAGAG | 82† | 521 |
| 689090 | 5073 | 5090 | N/A | N/A | CAGAAATGGGAAGAGGAA | 46† | 522 |
| 689091 | 5088 | 5105 | N/A | N/A | GCTAAAGCCAGGAGTCAG | 116† | 523 |
| 689092 | 5103 | 5120 | N/A | N/A | AGAGAATTCCAGAGAGCT | 100† | 524 |
| 689093 | 5118 | 5135 | N/A | N/A | AGACAAAGCTGAGAGAGA | 103† | 525 |
| 689094 | 5136 | 5153 | N/A | N/A | TCAGAAGGGAAGAGAGAG | 95† | 526 |
| 689095 | 5151 | 5168 | N/A | N/A | GTGTGAGAGACTGAGTCA | 102† | 527 |
| 689096 | 5166 | 5183 | N/A | N/A | ACAGAGCCAGGACGAGTG | 65† | 528 |
| 689097 | 5181 | 5198 | N/A | N/A | TAGGGAAGGACAGAGACA | 75† | 529 |
| 689098 | 5196 | 5213 | N/A | N/A | TCTATATAAAAGAGCTAG | 108† | 530 |
| 689099 | 5213 | 5230 | N/A | N/A | GACCCCATCTCTCTGTCT | 56† | 531 |
| 689100 | 5323 | 5340 | N/A | N/A | TAGGAGGCCGGGCAAGGT | 88† | 532 |
| 689101 | 5338 | 5355 | N/A | N/A | AGACGAAGAAGGAGCTAG | 99† | 533 |
| 689102 | 5353 | 5370 | N/A | N/A | AGAGGGCAGAGGCAGAGA | 42† | 534 |
| 689103 | 5368 | 5385 | N/A | N/A | GCAGAGAGCAGATGCAGA | 80† | 535 |
| 689104 | 5392 | 5409 | N/A | N/A | CGAGAGAAGGAGACAGAG | 104† | 536 |
| 689105 | 5436 | 5453 | N/A | N/A | GAGCCAGAGAGACCCAAG | 102† | 537 |
| 689106 | 5490 | 5507 | N/A | N/A | TCGCACAGTGGGAGGCGG | 61† | 538 |
| 689107 | 5515 | 5532 | N/A | N/A | CTGCGGCCGAGAGGGCGG | 90† | 539 |
| 689108 | 2831 | 2848 | 83 | 100 | TTCTCACCGGCTCCTGGG | 99 | 540 |
| 689109 | 2864 | 2881 | 116 | 133 | CCCCTGAGCTCATCCCCG | 128 | 541 |
| 689117 | 6236 | 6253 | 1138 | 1155 | CGTTCAGTGATTGTCGCT | 86 | 542 |
| 689118 | 6256 | 6273 | 1158 | 1175 | CGCATGGCTGCAGGCTTC | 8 | 543 |

TABLE 9
Reduction of APOE RNA by 5-8-5 MOE gapmers with mixed PO/PS internucleoside linkages
at a concentration of 4000 nM in Hep3B cells plated at 20,000 cells per well

| | SEQ ID | SEQ ID | SEQ ID | SEQ ID | | | |
|---|---|---|---|---|---|---|---|
| | No: 1 | No: 1 | No: 2 | No: 2 | | APOE | |
| Compound | Start | Stop | Start | Stop | | (% | SEQ ID |
| Number | Site | Site | Site | Site | Sequence (5′ to 3′) | UTC) | NO |
| 689014 | 6255 | 6272 | 1157 | 1174 | GCATGGCTGCAGGCTTCG | 43 | 169 |
| 689015 | 6257 | 6274 | 1159 | 1176 | TCGCATGGCTGCAGGCTT | 34 | 448 |
| 689046 | 6364 | 6381 | 1266 | 1283 | GGTGAATCTTTATTAAAC | 27 | 478 |
| 689047 | 6366 | 6383 | 1268 | 1285 | TTGGTGAATCTTTATTAA | 65 | 479 |
| 689048 | 6368 | 6385 | 1270 | 1287 | ACTTGGTGAATCTTTATT | 35 | 480 |
| 689049 | 6370 | 6387 | 1272 | 1289 | AAACTTGGTGAATCTTTA | 36 | 481 |
| 689050 | 6372 | 6389 | 1274 | 1291 | TGAAACTTGGTGAATCTT | 37 | 482 |
| 689051 | 6374 | 6391 | 1276 | 1293 | CGTGAAACTTGGTGAATC | 40 | 483 |
| 729667 | 6237 | 6254 | 1139 | 1156 | GCGTTCAGTGATTGTCGC | 77 | 544 |
| 729669 | 6239 | 6256 | 1141 | 1158 | CGGCGTTCAGTGATTGTC | 61 | 545 |
| 729671 | 6241 | 6258 | 1143 | 1160 | TTCGGCGTTCAGTGATTG | 86 | 546 |
| 729673 | 6243 | 6260 | 1145 | 1162 | GCTTCGGCGTTCAGTGAT | 77 | 547 |
| 729675 | 6245 | 6262 | 1147 | 1164 | AGGCTTCGGCGTTCAGTG | 83 | 548 |
| 729677 | 6247 | 6264 | 1149 | 1166 | GCAGGCTTCGGCGTTCAG | 72 | 549 |
| 729679 | 6249 | 6266 | 1151 | 1168 | CTGCAGGCTTCGGCGTTC | 70 | 550 |
| 729681 | 6251 | 6268 | 1153 | 1170 | GGCTGCAGGCTTCGGCGT | 105 | 551 |
| 729682 | 6253 | 6270 | 1155 | 1172 | ATGGCTGCAGGCTTCGGC | 52 | 552 |
| 729683 | 6259 | 6276 | 1161 | 1178 | GGTCGCATGGCTGCAGGC | 54 | 553 |
| 729684 | 6287 | 6304 | 1189 | 1206 | CGGAGGCAGGAGGCACGG | 83 | 554 |
| 729685 | 6289 | 6306 | 1191 | 1208 | CGCGGAGGCAGGAGGCAC | 75 | 555 |
| 729686 | 6291 | 6308 | 1193 | 1210 | TGCGCGGAGGCAGGAGGC | 82 | 556 |
| 729687 | 6293 | 6310 | 1195 | 1212 | GCTGCGCGGAGGCAGGAG | 78 | 557 |
| 729688 | 6295 | 6312 | 1197 | 1214 | AGGCTGCGCGGAGGCAGG | 64 | 558 |
| 729689 | 6297 | 6314 | 1199 | 1216 | GCAGGCTGCGCGGAGGCA | 72 | 559 |
| 729690 | 6299 | 6316 | 1201 | 1218 | CTGCAGGCTGCGCGGAGG | 85 | 560 |
| 729691 | 6301 | 6318 | 1203 | 1220 | CGCTGCAGGCTGCGCGGA | 83 | 561 |
| 729692 | 6303 | 6320 | 1205 | 1222 | CCCGCTGCAGGCTGCGCG | 83 | 562 |
| 729693 | 6305 | 6322 | 1207 | 1224 | CTCCCGCTGCAGGCTGCG | 59 | 563 |
| 729694 | 6307 | 6324 | 1209 | 1226 | GTCTCCCGCTGCAGGCTG | 56 | 564 |
| 729695 | 6309 | 6326 | 1211 | 1228 | GGGTCTCCCGCTGCAGGC | 67 | 565 |
| 729696 | 6311 | 6328 | 1213 | 1230 | CAGGGTCTCCCGCTGCAG | 63 | 566 |
| 729697 | 6313 | 6330 | 1215 | 1232 | GACAGGGTCTCCCGCTGC | 69 | 567 |
| 729698 | 6337 | 6354 | 1239 | 1256 | CCCCAGGAGGACGGCTGG | 85 | 568 |
| 729699 | 6339 | 6356 | 1241 | 1258 | CACCCCAGGAGGACGGCT | 95 | 569 |
| 729700 | 6341 | 6358 | 1243 | 1260 | TCCACCCCAGGAGGACGG | 96 | 570 |
| 729701 | 6343 | 6360 | 1245 | 1262 | GGTCCACCCCAGGAGGAC | 101 | 571 |
| 729702 | 6345 | 6362 | 1247 | 1264 | AGGGTCCACCCCAGGAGG | 87 | 572 |
| 729703 | 6347 | 6364 | 1249 | 1266 | CTAGGGTCCACCCCAGGA | 92 | 573 |
| 729704 | 6349 | 6366 | 1251 | 1268 | AACTAGGGTCCACCCCAG | 73 | 574 |
| 729706 | 6351 | 6368 | 1253 | 1270 | TAAACTAGGGTCCACCCC | 84 | 575 |
| 729707 | 6353 | 6370 | 1255 | 1272 | ATTAAACTAGGGTCCACC | 63 | 576 |
| 729708 | 6355 | 6372 | 1257 | 1274 | TTATTAAACTAGGGTCCA | 59 | 577 |
| 729709 | 6357 | 6374 | 1259 | 1276 | CTTTATTAAACTAGGGTC | 30 | 578 |
| 729710 | 6359 | 6376 | 1261 | 1278 | ATCTTTATTAAACTAGGG | 46 | 579 |
| 729711 | 6361 | 6378 | 1263 | 1280 | GAATCTTTATTAAACTAG | 36 | 580 |
| 729712 | 6363 | 6380 | 1265 | 1282 | GTGAATCTTTATTAAACT | 45 | 581 |
| 729719 | 6376 | 6393 | 1278 | 1295 | TGCGTGAAACTTGGTGAA | 45 | 582 |
| 1517923 | 6263 | 6280 | 1165 | 1182 | GTGGGGTCGCATGGCTGC | 62 | 583 |
| 1517925 | 6321 | 6338 | 1223 | 1240 | GGGGCGGGGACAGGGTCT | 98 | 584 |
| 1517934 | 6273 | 6290 | 1175 | 1192 | ACGGGGTGGCGTGGGGTC | 103 | 585 |
| 1517936 | 6333 | 6350 | 1235 | 1252 | AGGAGGACGGCTGGGGCG | 117 | 586 |
| 1517938 | 6329 | 6346 | 1231 | 1248 | GGACGGCTGGGGCGGGGA | 107 | 587 |
| 1517940 | 3338 | 3355 | N/A | N/A | CAAATTCCATCCCCCCAC | 102 | 588 |
| 1517958 | 3431 | 3448 | N/A | N/A | CCCATTCCCTATTTAACT | 97 | 589 |
| 1517963 | 6279 | 6296 | 1181 | 1198 | GGAGGCACGGGGTGGCGT | 101 | 590 |
| 1517974 | 3517 | 3534 | N/A | N/A | CCGGCCTCACCCCAGGTT | 99 | 591 |
| 1517975 | 3425 | 3442 | N/A | N/A | CCCTATTTAACTCCCTCC | 94 | 592 |
| 1517981 | 3271 | 3288 | N/A | N/A | TCTCCCTTCACATTCTAA | 92 | 593 |
| 1517986 | 6315 | 6332 | 1217 | 1234 | GGGACAGGGTCTCCCGCT | 74 | 594 |
| 1517987 | 6277 | 6294 | 1179 | 1196 | AGGCACGGGGTGGCGTGG | 88 | 595 |
| 1517997 | 6325 | 6342 | 1227 | 1244 | GGCTGGGGCGGGGACAGG | 100 | 596 |
| 1518001 | 6267 | 6284 | 1169 | 1186 | TGGCGTGGGGTCGCATGG | 66 | 597 |
| 1518004 | 3284 | 3301 | N/A | N/A | TCGCATTCCTCATTCTCC | 96 | 598 |
| 1518008 | 6323 | 6340 | 1225 | 1242 | CTGGGGCGGGGACAGGGT | 108 | 599 |
| 1518010 | 6335 | 6352 | 1237 | 1254 | CCAGGAGGACGGCTGGGG | 96 | 600 |
| 1518014 | 6317 | 6334 | 1219 | 1236 | CGGGGACAGGGTCTCCCG | 103 | 601 |
| 1518029 | 6269 | 6286 | 1171 | 1188 | GGTGGCGTGGGGTCGCAT | 79 | 602 |
| 1518030 | 6265 | 6282 | 1167 | 1184 | GCGTGGGGTCGCATGGCT | 49 | 603 |
| 1518039 | 6261 | 6278 | 1163 | 1180 | GGGGTCGCATGGCTGCAG | 69 | 604 |
| 1518041 | 6285 | 6302 | 1187 | 1204 | GAGGCAGGAGGCACGGGG | 99 | 605 |
| 1518046 | 6271 | 6288 | 1173 | 1190 | GGGGTGGCGTGGGGTCGC | 67 | 606 |
| 1518050 | 6283 | 6300 | 1185 | 1202 | GGCAGGAGGCACGGGGTG | 101 | 607 |
| 1518052 | 6319 | 6336 | 1221 | 1238 | GGCGGGGACAGGGTCTCC | 88 | 608 |
| 1518056 | 6327 | 6344 | 1229 | 1246 | ACGGCTGGGGCGGGGACA | 96 | 609 |
| 1518059 | 5552 | 5569 | 454 | 471 | GGCCTTCAACTCCTTCAT | 88 | 610 |
| 1518061 | 6275 | 6292 | 1177 | 1194 | GCACGGGGTGGCGTGGGG | 95 | 611 |
| 1518063 | 6281 | 6298 | 1183 | 1200 | CAGGAGGCACGGGGTGGC | 89 | 612 |
| 1518064 | 6331 | 6348 | 1233 | 1250 | GAGGACGGCTGGGGCGGG | 102 | 613 |

TABLE 10
Reduction of APOE RNA by 5-8-5 MOE gapmers with mixed PO/PS internucleoside linkages
at a concentration of 4000 nM in Hep3B cells plated at 20,000 cells per well

| | SEQ ID | SEQ ID | SEQ ID | SEQ ID | | | |
|---|---|---|---|---|---|---|---|
| | No: 1 | No: 1 | No: 2 | No: 2 | | APOE | |
| Compound | Start | Stop | Start | Stop | | (% | SEQ ID |
| Number | Site | Site | Site | Site | Sequence (5′ to 3′) | UTC) | NO |
| 689012 | 6252 | 6269 | 1154 | 1171 | TGGCTGCAGGCTTCGGCG | 89 | 446 |
| 689013 | 6254 | 6271 | 1156 | 1173 | CATGGCTGCAGGCTTCGG | 39 | 447 |
| 689016 | 6258 | 6275 | 1160 | 1177 | GTCGCATGGCTGCAGGCT | 39 | 170 |
| 689017 | 6260 | 6277 | 1162 | 1179 | GGGTCGCATGGCTGCAGG | 64 | 449 |
| 689018 | 6286 | 6303 | 1188 | 1205 | GGAGGCAGGAGGCACGGG | 80 | 450 |
| 689019 | 6288 | 6305 | 1190 | 1207 | GCGGAGGCAGGAGGCACG | 78 | 451 |
| 689020 | 6290 | 6307 | 1192 | 1209 | GCGCGGAGGCAGGAGGCA | 90 | 452 |
| 689021 | 6292 | 6309 | 1194 | 1211 | CTGCGCGGAGGCAGGAGG | 82 | 453 |
| 689022 | 6294 | 6311 | 1196 | 1213 | GGCTGCGCGGAGGCAGGA | 71 | 454 |
| 689023 | 6296 | 6313 | 1198 | 1215 | CAGGCTGCGCGGAGGCAG | 80 | 455 |
| 689024 | 6298 | 6315 | 1200 | 1217 | TGCAGGCTGCGCGGAGGC | 85 | 456 |
| 689025 | 6300 | 6317 | 1202 | 1219 | GCTGCAGGCTGCGCGGAG | 80 | 457 |
| 689026 | 6302 | 6319 | 1204 | 1221 | CCGCTGCAGGCTGCGCGG | 97 | 458 |
| 689027 | 6304 | 6321 | 1206 | 1223 | TCCCGCTGCAGGCTGCGC | 59 | 459 |
| 689028 | 6306 | 6323 | 1208 | 1225 | TCTCCCGCTGCAGGCTGC | 63 | 460 |
| 689029 | 6308 | 6325 | 1210 | 1227 | GGTCTCCCGCTGCAGGCT | 64 | 461 |
| 689030 | 6310 | 6327 | 1212 | 1229 | AGGGTCTCCCGCTGCAGG | 73 | 462 |
| 689031 | 6312 | 6329 | 1214 | 1231 | ACAGGGTCTCCCGCTGCA | 78 | 463 |
| 689032 | 6314 | 6331 | 1216 | 1233 | GGACAGGGTCTCCCGCTG | 73 | 464 |
| 689033 | 6336 | 6353 | 1238 | 1255 | CCCAGGAGGACGGCTGGG | 102 | 465 |
| 689034 | 6338 | 6355 | 1240 | 1257 | ACCCCAGGAGGACGGCTG | 92 | 466 |
| 689035 | 6340 | 6357 | 1242 | 1259 | CCACCCCAGGAGGACGGC | 95 | 467 |
| 689036 | 6342 | 6359 | 1244 | 1261 | GTCCACCCCAGGAGGACG | 98 | 468 |
| 689037 | 6344 | 6361 | 1246 | 1263 | GGGTCCACCCCAGGAGGA | 99 | 469 |
| 689038 | 6346 | 6363 | 1248 | 1265 | TAGGGTCCACCCCAGGAG | 96 | 470 |
| 689039 | 6348 | 6365 | 1250 | 1267 | ACTAGGGTCCACCCCAGG | 90 | 471 |
| 689040 | 6352 | 6369 | 1254 | 1271 | TTAAACTAGGGTCCACCC | 83 | 472 |
| 689041 | 6354 | 6371 | 1256 | 1273 | TATTAAACTAGGGTCCAC | 57 | 473 |
| 689042 | 6356 | 6373 | 1258 | 1275 | TTTATTAAACTAGGGTCC | 81 | 474 |
| 689043 | 6358 | 6375 | 1260 | 1277 | TCTTTATTAAACTAGGGT | 29 | 475 |
| 689044 | 6360 | 6377 | 1262 | 1279 | AATCTTTATTAAACTAGG | 46 | 476 |
| 689045 | 6362 | 6379 | 1264 | 1281 | TGAATCTTTATTAAACTA | 71 | 477 |
| 689046 | 6364 | 6381 | 1266 | 1283 | GGTGAATCTTTATTAAAC | 35 | 478 |
| 689117 | 6236 | 6253 | 1138 | 1155 | CGTTCAGTGATTGTCGCT | 81 | 542 |
| 689118 | 6256 | 6273 | 1158 | 1175 | CGCATGGCTGCAGGCTTC | 32 | 543 |
| 729668 | 6238 | 6255 | 1140 | 1157 | GGCGTTCAGTGATTGTCG | 70 | 614 |
| 729670 | 6240 | 6257 | 1142 | 1159 | TCGGCGTTCAGTGATTGT | 81 | 615 |
| 729672 | 6242 | 6259 | 1144 | 1161 | CTTCGGCGTTCAGTGATT | 81 | 616 |
| 729674 | 6244 | 6261 | 1146 | 1163 | GGCTTCGGCGTTCAGTGA | 73 | 617 |
| 729676 | 6246 | 6263 | 1148 | 1165 | CAGGCTTCGGCGTTCAGT | 80 | 618 |
| 729678 | 6248 | 6265 | 1150 | 1167 | TGCAGGCTTCGGCGTTCA | 73 | 619 |
| 729680 | 6250 | 6267 | 1152 | 1169 | GCTGCAGGCTTCGGCGTT | 83 | 620 |
| 729705 | 6350 | 6367 | 1252 | 1269 | AAACTAGGGTCCACCCCA | 93 | 621 |
| 729713 | 6365 | 6382 | 1267 | 1284 | TGGTGAATCTTTATTAAA | 58 | 622 |
| 729714 | 6367 | 6384 | 1269 | 1286 | CTTGGTGAATCTTTATTA | 36 | 623 |
| 729715 | 6369 | 6386 | 1271 | 1288 | AACTTGGTGAATCTTTAT | 50 | 624 |
| 729716 | 6371 | 6388 | 1273 | 1290 | GAAACTTGGTGAATCTTT | 48 | 625 |
| 729717 | 6373 | 6390 | 1275 | 1292 | GTGAAACTTGGTGAATCT | 41 | 626 |
| 729718 | 6375 | 6392 | 1277 | 1294 | GCGTGAAACTTGGTGAAT | 42 | 627 |
| 1517913 | 6278 | 6295 | 1180 | 1197 | GAGGCACGGGGTGGCGTG | 89 | 628 |
| 1517914 | 6328 | 6345 | 1230 | 1247 | GACGGCTGGGGCGGGGAC | 101 | 629 |
| 1517915 | 6316 | 6333 | 1218 | 1235 | GGGGACAGGGTCTCCCGC | 88 | 630 |
| 1517919 | 6272 | 6289 | 1174 | 1191 | CGGGGTGGCGTGGGGTCG | 105 | 631 |
| 1517931 | 3066 | 3083 | N/A | N/A | ATGGCTTACATCCCAGTC | 107 | 632 |
| 1517933 | 6282 | 6299 | 1184 | 1201 | GCAGGAGGCACGGGGTGG | 80 | 633 |
| 1517945 | 6334 | 6351 | 1236 | 1253 | CAGGAGGACGGCTGGGGC | 114 | 634 |
| 1517947 | 3340 | 3357 | N/A | N/A | TTCAAATTCCATCCCCCC | 99 | 635 |
| 1517955 | 6274 | 6291 | 1176 | 1193 | CACGGGGTGGCGTGGGGT | 94 | 636 |
| 1517960 | 6326 | 6343 | 1228 | 1245 | CGGCTGGGGCGGGGACAG | 119 | 637 |
| 1517965 | 6318 | 6335 | 1220 | 1237 | GCGGGGACAGGGTCTCCC | 88 | 638 |
| 1517968 | 6276 | 6293 | 1178 | 1195 | GGCACGGGGTGGCGTGGG | 83 | 639 |
| 1517971 | 6280 | 6297 | 1182 | 1199 | AGGAGGCACGGGGTGGCG | 96 | 640 |
| 1517973 | 6284 | 6301 | 1186 | 1203 | AGGCAGGAGGCACGGGGT | 98 | 641 |
| 1517990 | 6262 | 6279 | 1164 | 1181 | TGGGGTCGCATGGCTGCA | 58 | 642 |
| 1518000 | 6268 | 6285 | 1170 | 1187 | GTGGCGTGGGGTCGCATG | 87 | 643 |
| 1518002 | 6330 | 6347 | 1232 | 1249 | AGGACGGCTGGGGCGGGG | 105 | 644 |
| 1518006 | 6270 | 6287 | 1172 | 1189 | GGGTGGCGTGGGGTCGCA | 61 | 645 |
| 1518011 | 6266 | 6283 | 1168 | 1185 | GGCGTGGGGTCGCATGGC | 56 | 646 |
| 1518015 | 3429 | 3446 | N/A | N/A | CATTCCCTATTTAACTCC | 89 | 647 |
| 1518019 | 6320 | 6337 | 1222 | 1239 | GGGCGGGGACAGGGTCTC | 80 | 648 |
| 1518023 | 3283 | 3300 | N/A | N/A | CGCATTCCTCATTCTCCC | 95 | 649 |
| 1518024 | 3842 | 3859 | N/A | N/A | CAACTTCTAACTCCTATC | 119 | 650 |
| 1518032 | 3307 | 3324 | N/A | N/A | CCGGTTCCATCTCAGTCC | 124 | 651 |
| 1518036 | 6264 | 6281 | 1166 | 1183 | CGTGGGGTCGCATGGCTG | 81 | 652 |
| 1518043 | 6332 | 6349 | 1234 | 1251 | GGAGGACGGCTGGGGCGG | 113 | 653 |
| 1518045 | 6322 | 6339 | 1224 | 1241 | TGGGGCGGGGACAGGGTC | 99 | 654 |
| 1518057 | 3457 | 3474 | N/A | N/A | CAGCACATTTACCAAGCC | 111 | 655 |
| 1518062 | 6324 | 6341 | 1226 | 1243 | GCTGGGGCGGGGACAGGG | 90 | 656 |

TABLE 11
Reduction of APOE RNA by 5-8-5 MOE gapmers with mixed PO/PS internucleoside linkages
at a concentration of 4000 nM in Hep3B cells plated at 5000 cells per well

| | SEQ ID | SEQ ID | SEQ ID | SEQ ID | | | |
|---|---|---|---|---|---|---|---|
| | No: 1 | No: 1 | No: 2 | No: 2 | | APOE | |
| Compound | Start | Stop | Start | Stop | | (% | SEQ ID |
| Number | Site | Site | Site | Site | Sequence (5′ to 3′) | UTC) | NO |
| 426048 | 6254 | 6273 | 1156 | 1175 | CGCATGGCTGCAGGCTTCGG | 56 | 70 |
| 688818 | 5680 | 5697 | 582 | 599 | ACCAGGCGGCCGCACACG | 83 | 252 |
| 688819 | 5682 | 5699 | 584 | 601 | GCACCAGGCGGCCGCACA | 120 | 253 |
| 688820 | 5684 | 5701 | 586 | 603 | CTGCACCAGGCGGCCGCA | 124 | 254 |
| 688874 | 5806 | 5823 | 708 | 725 | CGCTTCTGCAGGTCATCG | 83 | 308 |
| 688875 | 5821 | 5838 | 723 | 740 | TGGTACACTGCCAGGCGC | 117 | 309 |
| 689014 | 6255 | 6272 | 1157 | 1174 | GCATGGCTGCAGGCTTCG | 63 | 169 |
| 689015 | 6257 | 6274 | 1159 | 1176 | TCGCATGGCTGCAGGCTT | 49 | 448 |
| 689017 | 6260 | 6277 | 1162 | 1179 | GGGTCGCATGGCTGCAGG | 87 | 449 |
| 689029 | 6308 | 6325 | 1210 | 1227 | GGTCTCCCGCTGCAGGCT | 53 | 461 |
| 689046 | 6364 | 6381 | 1266 | 1283 | GGTGAATCTTTATTAAAC | 31 | 478 |
| 689118 | 6256 | 6273 | 1158 | 1175 | CGCATGGCTGCAGGCTTC | 11 | 543 |
| 693761 | 5667 | 5684 | 569 | 586 | ACACGTCCTCCATGTCCG | 81 | 657 |
| 693762 | 5668 | 5685 | 570 | 587 | CACACGTCCTCCATGTCC | 87 | 658 |
| 693763 | 5669 | 5686 | 571 | 588 | GCACACGTCCTCCATGTC | 104 | 659 |
| 693764 | 5670 | 5687 | 572 | 589 | CGCACACGTCCTCCATGT | 74 | 660 |
| 693765 | 5671 | 5688 | 573 | 590 | CCGCACACGTCCTCCATG | 89 | 661 |
| 693766 | 5672 | 5689 | 574 | 591 | GCCGCACACGTCCTCCAT | 74 | 662 |
| 693767 | 5673 | 5690 | 575 | 592 | GGCCGCACACGTCCTCCA | 85 | 663 |
| 693768 | 5674 | 5691 | 576 | 593 | CGGCCGCACACGTCCTCC | 66 | 664 |
| 693769 | 5675 | 5692 | 577 | 594 | GCGGCCGCACACGTCCTC | 66 | 665 |
| 693770 | 5676 | 5693 | 578 | 595 | GGCGGCCGCACACGTCCT | 69 | 666 |
| 693771 | 5677 | 5694 | 579 | 596 | AGGCGGCCGCACACGTCC | 94 | 667 |
| 693772 | 5678 | 5695 | 580 | 597 | CAGGCGGCCGCACACGTC | 106 | 668 |
| 693773 | 5679 | 5696 | 581 | 598 | CCAGGCGGCCGCACACGT | 101 | 669 |
| 693774 | 5681 | 5698 | 583 | 600 | CACCAGGCGGCCGCACAC | 85 | 670 |
| 693775 | 5683 | 5700 | 585 | 602 | TGCACCAGGCGGCCGCAC | 137 | 671 |
| 693776 | 5805 | 5822 | 707 | 724 | GCTTCTGCAGGTCATCGG | 85 | 672 |
| 693777 | 5807 | 5824 | 709 | 726 | GCGCTTCTGCAGGTCATC | 111 | 673 |
| 693778 | 5808 | 5825 | 710 | 727 | GGCGCTTCTGCAGGTCAT | 134 | 674 |
| 693779 | 5809 | 5826 | 711 | 728 | AGGCGCTTCTGCAGGTCA | 86 | 675 |
| 693780 | 5810 | 5827 | 712 | 729 | CAGGCGCTTCTGCAGGTC | 93 | 676 |
| 693781 | 5811 | 5828 | 713 | 730 | CCAGGCGCTTCTGCAGGT | 113 | 677 |
| 693782 | 5812 | 5829 | 714 | 731 | GCCAGGCGCTTCTGCAGG | 88 | 678 |
| 693783 | 5813 | 5830 | 715 | 732 | TGCCAGGCGCTTCTGCAG | 100 | 679 |
| 693784 | 5814 | 5831 | 716 | 733 | CTGCCAGGCGCTTCTGCA | 105 | 680 |
| 693785 | 5815 | 5832 | 717 | 734 | ACTGCCAGGCGCTTCTGC | 91 | 681 |
| 693786 | 5816 | 5833 | 718 | 735 | CACTGCCAGGCGCTTCTG | 95 | 682 |
| 693787 | 5817 | 5834 | 719 | 736 | ACACTGCCAGGCGCTTCT | 101 | 683 |
| 693788 | 5818 | 5835 | 720 | 737 | TACACTGCCAGGCGCTTC | 81 | 684 |
| 693789 | 5819 | 5836 | 721 | 738 | GTACACTGCCAGGCGCTT | 100 | 685 |
| 693790 | 5820 | 5837 | 722 | 739 | GGTACACTGCCAGGCGCT | 81 | 686 |
| 693791 | 5822 | 5839 | 724 | 741 | CTGGTACACTGCCAGGCG | 107 | 687 |

TABLE 12
Reduction of APOE RNA by 5-8-5 MOE gapmers
with mixed PO/PS internucleoside linkages
at a concentration of 4000 nM in Hep3B
cells plated at 5000 cells per well

| | SEQ | SEQ | SEQ | SEQ | | | |
|---|---|---|---|---|---|---|---|
| | ID | ID | ID | ID | | | |
| | No: | No: | No: | No: | | | |
| Com- | 5 | 5 | 6 | 6 | | APOE | SEQ |
| pound | Start | Stop | Start | Stop | Sequence | (% | ID |
| Number | Site | Site | Site | Site | (5′ to 3′) | UTC) | NO |
| 693792 | N/A | N/A | 454 | 471 | GCACGTCCTCCAT | 98 | 688 |
| | | | | | GTCCG | | |
| 693793 | N/A | N/A | 455 | 472 | CGCACGTCCTCCA | 136 | 689 |
| | | | | | TGTCC | | |
| 693794 | N/A | N/A | 456 | 473 | GCGCACGTCCTCC | 99 | 690 |
| | | | | | ATGTC | | |
| 693795 | N/A | N/A | 457 | 474 | CGCGCACGTCCTC | 81 | 691 |
| | | | | | CATGT | | |
| 693796 | N/A | N/A | 458 | 475 | CCGCGCACGTCCT | 112 | 692 |
| | | | | | CCATG | | |
| 693797 | N/A | N/A | 459 | 476 | GCCGCGCACGTCC | 104 | 693 |
| | | | | | TCCAT | | |
| 693798 | N/A | N/A | 460 | 477 | GGCCGCGCACGTC | 77 | 694 |
| | | | | | CTCCA | | |
| 693799 | N/A | N/A | 461 | 478 | CGGCCGCGCACGT | 98 | 695 |
| | | | | | CCTCC | | |
| 693800 | N/A | N/A | 462 | 479 | GCGGCCGCGCACG | 71 | 696 |
| | | | | | TCCTC | | |
| 693801 | N/A | N/A | 463 | 480 | GGCGGCCGCGCAC | 100 | 697 |
| | | | | | GTCCT | | |
| 693802 | N/A | N/A | 464 | 481 | AGGCGGCCGCGCA | 136 | 698 |
| | | | | | CGTCC | | |
| 693803 | N/A | N/A | 465 | 482 | CAGGCGGCCGCGC | 74 | 699 |
| | | | | | ACGTC | | |
| 693804 | N/A | N/A | 466 | 483 | CCAGGCGGCCGCG | 120 | 700 |
| | | | | | CACGT | | |
| 693805 | N/A | N/A | 467 | 484 | ACCAGGCGGCCGC | 103 | 701 |
| | | | | | GCACG | | |
| 693806 | N/A | N/A | 468 | 485 | CACCAGGCGGCCG | 105 | 702 |
| | | | | | CGCAC | | |
| 693807 | N/A | N/A | 469 | 486 | GCACCAGGCGGCC | 97 | 703 |
| | | | | | GCGCA | | |
| 693808 | N/A | N/A | 470 | 487 | TGCACCAGGCGGC | 78 | 704 |
| | | | | | CGCGC | | |
| 693809 | N/A | N/A | 471 | 488 | CTGCACCAGGCGG | 83 | 705 |
| | | | | | CCGCG | | |
| 693810 | 99 | 116 | N/A | N/A | ACTTCTGCAGGTC | 104 | 706 |
| | | | | | ATCGG | | |
| 693811 | 100 | 117 | N/A | N/A | CACTTCTGCAGGT | 80 | 707 |
| | | | | | CATCG | | |
| 693812 | 101 | 118 | N/A | N/A | GCACTTCTGCAGG | 111 | 708 |
| | | | | | TCATC | | |
| 693813 | 102 | 119 | N/A | N/A | GGCACTTCTGCAG | 112 | 709 |
| | | | | | GTCAT | | |
| 693814 | 103 | 120 | N/A | N/A | AGGCACTTCTGCA | 82 | 710 |
| | | | | | GGTCA | | |
| 693815 | 104 | 121 | N/A | N/A | CAGGCACTTCTGC | 89 | 711 |
| | | | | | AGGTC | | |
| 693816 | 105 | 122 | N/A | N/A | CCAGGCACTTCTG | 102 | 712 |
| | | | | | CAGGT | | |
| 693817 | 106 | 123 | N/A | N/A | GCCAGGCACTTCT | 76 | 713 |
| | | | | | GCAGG | | |
| 693818 | 107 | 124 | N/A | N/A | TGCCAGGCACTTC | 141 | 714 |
| | | | | | TGCAG | | |
| 693819 | 108 | 125 | N/A | N/A | CTGCCAGGCACTT | 121 | 715 |
| | | | | | CTGCA | | |
| 693820 | 109 | 126 | N/A | N/A | ACTGCCAGGCACT | 98 | 716 |
| | | | | | TCTGC | | |
| 693821 | 110 | 127 | N/A | N/A | CACTGCCAGGCAC | 98 | 717 |
| | | | | | TTCTG | | |
| 693822 | 111 | 128 | N/A | N/A | ACACTGCCAGGCA | 119 | 718 |
| | | | | | CTTCT | | |
| 693823 | 112 | 129 | N/A | N/A | TACACTGCCAGGC | 87 | 719 |
| | | | | | ACTTC | | |
| 693824 | 113 | 130 | N/A | N/A | GTACACTGCCAGG | 369 | 720 |
| | | | | | CACTT | | |
| 693825 | 114 | 131 | N/A | N/A | GGTACACTGCCAG | 81 | 721 |
| | | | | | GCACT | | |
| 693826 | 115 | 132 | N/A | N/A | TGGTACACTGCCA | 86 | 722 |
| | | | | | GGCAC | | |
| 693827 | 116 | 133 | N/A | N/A | CTGGTACACTGCC | 73 | 723 |
| | | | | | AGGCA | | |

TABLE 13
Reduction of APOE RNA by 5-8-5 MOE gapmers
with mixed PO/PS internucleoside linkages
at a concentration of 4000 nM in Hep3B
cells plated at 20,000 cells per well

| | SEQ | SEQ | | | |
|---|---|---|---|---|---|
| | ID | ID | | | |
| | No: | No: | | | |
| Com- | 3 | 3 | | APOE | SEQ |
| pound | Start | Stop | Sequence | (% | ID |
| Number | Site | Site | (5′ to 3′) | UTC) | NO |
| 688667 | 35 | 52 | GGCCAGTCGGCTCCTGGG | 75 | 724 |
| 688668 | 39 | 56 | GATTGGCCAGTCGGCTCC | 100 | 725 |
| 688669 | 41 | 58 | GTGATTGGCCAGTCGGCT | 78 | 726 |
| 688670 | 43 | 60 | CTGTGATTGGCCAGTCGG | 121 | 727 |

TABLE 14
Reduction of APOE RNA by 5-8-5 MOE gapmers
with mixed PO/PS internucleoside linkages
at a concentration of 2000 nM in HepG2
cells plated at 20,000 cells per well

| | SEQ | SEQ | SEQ | SEQ | | | |
|---|---|---|---|---|---|---|---|
| | ID | ID | ID | ID | | | |
| | No: | No: | No: | No: | | | |
| Com- | 3 | 3 | 4 | 4 | Sequence | APOE | SEQ |
| pound | Start | Stop | Start | Stop | (5′ to | (% | ID |
| Number | Site | Site | Site | Site | 3′) | UTC) | NO |
| 689110 | N/A | N/A | 768 | 785 | TGCCGGCCG | 50 | 728 |
| | | | | | CACCCGGCC | | |
| 689111 | N/A | N/A | 801 | 818 | TGTAGCGGC | 53 | 729 |
| | | | | | TGGCCCGGC | | |
| 689112 | N/A | N/A | 854 | 871 | CATTTCTCTC | 84 | 730 |
| | | | | | CATCCGCG | | |
| 689113 | N/A | N/A | 866 | 883 | GGTCCCGCT | 95 | 731 |
| | | | | | GCCCATTTC | | |
| 689114 | 155 | 172 | N/A | N/A | TCTGTGGCG | 56 | 732 |
| | | | | | CAGCTCGGG | | |
| 689115 | 257 | 274 | N/A | N/A | GAGCAGCTC | 68 | 733 |
| | | | | | CTCTGCACT | | |
| 689116 | 729 | 746 | N/A | N/A | AACTTAGGG | 121 | 734 |
| | | | | | TCCACTCCT | | |

### Example 3: Effect of 5-10-5 MOE Mixed Backbone Modified Oligonucleotides on Human APOE RNA In Vitro, Single Dose

[0705] Modified oligonucleotides complementary to human APOE nucleic acid were designed and tested for their single dose effects on APOE RNA in vitro. The modified oligonucleotides were tested in a series of experiments under the culture conditions indicated in the tables below.

[0706] The modified oligonucleotides in the tables below are 5-10-5 MOE gapmers with mixed PO/PS internucleoside linkages. The gapmers are 20 nucleosides in length, wherein the central gap segment consists often 2′-β-D-deoxynucleosides, and wherein the 5′ and 3′ wing segments each consist of five 2′-MOE modified nucleosides. The sugar motif for the gapmers is (from 5′ to 3′): eeeeeddddddddddeeeee; wherein ‘d’ represents a 2′-β-D-deoxyribosyl sugar, and ‘e’ represents a 2′-MOE modified sugar moiety. The internucleoside linkage motif for the gapmers is (from 5′ to 3′): sooosssssssssssooss; wherein each ‘o’ represents a phosphodiester internucleoside linkage and each ‘s’ represents a phosphorothioate internucleoside linkage. Each cytosine residue is a 5-methyl cytosine.

[0707] “Start site” indicates the 5′-most nucleoside to which the modified oligonucleotide is complementary in the target nucleic acid sequence. “Stop site” indicates the 3′-most nucleoside to which the modified oligonucleotide is complementary in the target nucleic acid sequence. Each modified oligonucleotide listed in the tables below is 100% complementary to SEQ ID NO: 1 (described herein above), to SEQ ID NO: 2 (described herein above), or to both. ‘N/A’ indicates that the modified oligonucleotide is not 100% complementary to that particular target nucleic acid sequence.

[0708] The modified oligonucleotides were tested either in cultured Hep3B cells or in primary transgenic mouse hepatocytes as indicated in the tables below. A transgenic mouse model was obtained from Taconic (model #1549). The transgenic mouse model has a C₅₇BL/6 genetic background and expresses the human apolipoprotein E4 isoform. Primary mouse hepatocytes were isolated from transgenic mouse livers and were treated with modified oligonucleotide at a concentration of 5000 nM by free uptake at a density of 15,000 cells per well. After a treatment period of approximately 24 hours, total RNA was isolated from the cells and APOE RNA levels were measured by quantitative real-time RTPCR. In the case of the experiments carried out on cultured Hep3B cells, the cells were treated with modified oligonucleotide at a concentration of 4000 nM by electroporation at a density of 20,000 cells per well. After a treatment period of approximately 24 hours, total RNA was isolated from the cells and APOE RNA levels were measured by quantitative real-time RTPCR.

[0709] APOE RNA levels were measured by human primer-probe set RTS3073 (described herein in Example 1). APOE RNA levels were normalized to total RNA content, as measured by RIBOGREEN®. Results are presented in the tables below as percent APOE RNA relative to untreated control cells (% UTC). Each table represents results from an individual assay plate. The values marked with an “t” indicate that the modified oligonucleotide is complementary to the amplicon region of the primer probe set. Additional assays may be used to measure the potency and efficacy of the modified oligonucleotides complementary to the amplicon region. In Tables 15-20 below, Compound 689046 (described herein above) was included for reference.

TABLE 15
Reduction of APOE RNA by 5-10-5 MOE gapmers
with mixed PO/PS internucleoside linkages
at a concentration of 5000 nM in transgenic
primary mouse hepatocytes plated at 15,000
cells per well

| | SEQ | SEQ | SEQ | SEQ | | | |
|---|---|---|---|---|---|---|---|
| | ID | ID | ID | ID | | | |
| | No: | No: | No: | No: | | | |
| Com- | 1 | 1 | 2 | 2 | | APOE | SEQ |
| pound | Start | Stop | Start | Stop | Sequence | (% | ID |
| Number | Site | Site | Site | Site | (5′ to 3′) | UTC) | NO |
| 689046 | 6364 | 6381 | 1266 | 1283 | GGTGAATCTTTA | 8 | 478 |
| | | | | | TTAAAC | | |
| 708022 | 6257 | 6276 | 1159 | 1178 | GGTCGCATGGCT | 10 | 71 |
| | | | | | GCAGGCTT | | |
| 708024 | 6371 | 6390 | 1273 | 1292 | GTGAAACTTGGT | 16 | 77 |
| | | | | | GAATCTTT | | |
| 708027 | 6234 | 6253 | 1136 | 1155 | CGTTCAGTGATT | 40 | 69 |
| | | | | | GTCGCTGG | | |
| 942333 | 2749 | 2768 | 1 | 20 | TATAGGGCTCCC | 111 | 735 |
| | | | | | CCTGTCCC | | |
| 942339 | 2755 | 2774 | 7 | 26 | TCCAATTATAGG | 98 | 736 |
| | | | | | GCTCCCCC | | |
| 942345 | 2762 | 2781 | 14 | 33 | AGACTTGTCCAA | 109 | 737 |
| | | | | | TTATAGGG | | |
| 942351 | 2805 | 2824 | 57 | 76 | CGTCCTTCACCT | 82 | 738 |
| | | | | | CCGCTGGG | | |
| 942357 | 3638 | 3657 | 212 | 231 | TGTGACCAGCAA | 75 | 739 |
| | | | | | CGCAGCCC | | |
| 942363 | 3644 | 3663 | 218 | 237 | CAGGAATGTGAC | 70 | 740 |
| | | | | | CAGCAACG | | |
| 942369 | 4806 | 4825 | 288 | 307 | CGGTCTGCTGGC | 84 | 741 |
| | | | | | GCAGCTCG | | |
| 942375 | 4812 | 4831 | 294 | 313 | GCCACTCGGTCT | 93 | 742 |
| | | | | | GCTGGCGC | | |
| 942381 | 4850 | 4869 | 332 | 351 | AAAGCGACCCAG | 49† | 743 |
| | | | | | TGCCAGTT | | |
| 942387 | 4857 | 4876 | 339 | 358 | AATCCCAAAAGC | 28† | 744 |
| | | | | | GACCCAGT | | |
| 942393 | 4863 | 4882 | 345 | 364 | GCAGGTAATCCC | 38† | 745 |
| | | | | | AAAAGCGA | | |
| 942398 | 4869 | 4888 | 351 | 370 | CCCAGCGCAGGT | 18† | 746 |
| | | | | | AATCCCAA | | |
| 942403 | 4876 | 4895 | 358 | 377 | GTCTGCACCCAG | 18† | 747 |
| | | | | | CGCAGGTA | | |
| 942407 | 5562 | 5581 | 464 | 483 | TTCCGATTTGTA | 79 | 748 |
| | | | | | GGCCTTCA | | |
| 942412 | 5568 | 5587 | 470 | 489 | CTCCAGTTCCGA | 71 | 749 |
| | | | | | TTTGTAGG | | |
| 942418 | 5575 | 5594 | 477 | 496 | GTTGTTCCTCCA | 76 | 750 |
| | | | | | GTTCCGAT | | |
| 942424 | 5618 | 5637 | 520 | 539 | TCCTTGGACAGC | 120 | 43 |
| | | | | | CGTGCCCG | | |
| 942430 | 5662 | 5681 | 564 | 583 | CGTCCTCCATGT | 72 | 751 |
| | | | | | CCGCGCCC | | |
| 942436 | 5686 | 5705 | 588 | 607 | GGTACTGCACCA | 130 | 752 |
| | | | | | GGCGGCCG | | |
| 942442 | 5692 | 5711 | 594 | 613 | CGCCGCGGTACT | 91 | 753 |
| | | | | | GCACCAGG | | |
| 942448 | 5718 | 5737 | 620 | 639 | GCTCTGGCCGAG | 84 | 754 |
| | | | | | CATGGCCT | | |
| 942454 | 5725 | 5744 | 627 | 646 | CCTCGGTGCTCT | 77 | 755 |
| | | | | | GGCCGAGC | | |
| 942460 | 5747 | 5766 | 649 | 668 | GAGGCGAGGCGC | 100 | 756 |
| | | | | | ACCCGCAG | | |
| 942466 | 5765 | 5784 | 667 | 686 | CGCAGCTTGCGC | 87 | 48 |
| | | | | | AGGTGGGA | | |
| 942472 | 5772 | 5791 | 674 | 693 | CCGCTTACGCAG | 53 | 757 |
| | | | | | CTTGCGCA | | |
| 942478 | 5778 | 5797 | 680 | 699 | GAGGAGCCGCTT | 91 | 758 |
| | | | | | ACGCAGCT | | |
| 942484 | 5784 | 5803 | 686 | 705 | ATCGCGGAGGAG | 91 | 759 |
| | | | | | CCGCTTAC | | |
| 942490 | 5791 | 5810 | 693 | 712 | CATCGGCATCGC | 67 | 760 |
| | | | | | GGAGGAGC | | |
| 942496 | 5797 | 5816 | 699 | 718 | GCAGGTCATCGG | 66 | 761 |
| | | | | | CATCGCGG | | |
| 942501 | 5826 | 5845 | 728 | 747 | CCCGGCCTGGTA | 81 | 762 |
| | | | | | CACTGCCA | | |
| 942507 | 5833 | 5852 | 735 | 754 | CGCGGGCCCCGG | 83 | 763 |
| | | | | | CCTGGTAC | | |
| 942513 | 5902 | 5921 | 804 | 823 | GCACGCGGCCCT | 88 | 764 |
| | | | | | GTTCCACC | | |
| 942519 | 5908 | 5927 | 810 | 829 | CGGCCCGCACGC | 95 | 765 |
| | | | | | GGCCCTGT | | |
| 942525 | 5915 | 5934 | 817 | 836 | ACAGTGGCGGCC | 137 | 766 |
| | | | | | CGCACGCG | | |
| 942531 | 5921 | 5940 | 823 | 842 | GAGCCCACAGTG | 105 | 767 |
| | | | | | GCGGCCCG | | |
| 942537 | 5948 | 5967 | 850 | 869 | CGCTCCTGTAGC | 91 | 768 |
| | | | | | GGCTGGCC | | |
| 942543 | 5978 | 5997 | 880 | 899 | GCGCGCAGCCGC | 96 | 769 |
| | | | | | TCGCCCCA | | |
| 942549 | 6010 | 6029 | 912 | 931 | CGCGGGTCCGGC | 96 | 770 |
| | | | | | TGCCCATC | | |
| 942555 | 6016 | 6035 | 918 | 937 | GGCGGTCGCGGG | 86 | 771 |
| | | | | | TCCGGCTG | | |
| 942561 | 6056 | 6075 | 958 | 977 | TTGGCGCGCACC | 96 | 772 |
| | | | | | TCCGCCAC | | |
| 942567 | 6063 | 6082 | 965 | 984 | CTCCAGCTTGGC | 83 | 773 |
| | | | | | GCGCACCT | | |
| 942573 | 6125 | 6144 | 1027 | 1046 | AACCAGCTCTTG | 76 | 774 |
| | | | | | AGGCGGGC | | |
| 942579 | 6131 | 6150 | 1033 | 1052 | GGCTCGAACCAG | 90 | 775 |
| | | | | | CTCTTGAG | | |
| 942594 | 6349 | 6368 | 1251 | 1270 | TAAACTAGGGTC | 44 | 776 |
| | | | | | CACCCCAG | | |
| 942600 | 2833 | 2852 | 85 | 104 | GCGCTTCTCACC | 101 | 777 |
| | | | | | GGCTCCTG | | |
| 942606 | 2840 | 2859 | 92 | 111 | CCCGACTGCGCT | 114 | 778 |
| | | | | | TCTCACCG | | |
| 942612 | 2846 | 2865 | 98 | 117 | CGTGCCCCCGAC | 100 | 779 |
| | | | | | TGCGCTTC | | |
| 942618 | 2855 | 2874 | 107 | 126 | GCTCATCCCCGT | 59 | 780 |
| | | | | | GCCCCCGA | | |
| 942624 | 3448 | 3467 | N/A | N/A | TTTACCAAGCCG | 108 | 781 |
| | | | | | CCCCCAAC | | |
| 942630 | 3454 | 3473 | N/A | N/A | AGCACATTTACC | 78 | 782 |
| | | | | | AAGCCGCC | | |
| 942636 | 3495 | 3514 | N/A | N/A | CCTTCCAAGCCT | 101 | 783 |
| | | | | | TGTTGCAT | | |
| 942642 | 2926 | 2945 | N/A | N/A | CGAGTAGCTCTC | 85 | 784 |
| | | | | | CTGAGACT | | |
| 942648 | 2932 | 2951 | N/A | N/A | CGACCCCGAGTA | 73 | 785 |
| | | | | | GCTCTCCT | | |
| 942654 | 2938 | 2957 | N/A | N/A | CAAGCCCGACCC | 79 | 786 |
| | | | | | CGAGTAGC | | |
| 942660 | 3067 | 3086 | N/A | N/A | GCTATGGCTTAC | 104 | 787 |
| | | | | | ATCCCAGT | | |
| 942666 | 3096 | 3115 | N/A | N/A | TAAATGATAGTG | 75 | 788 |
| | | | | | ACAACTCG | | |
| 942672 | 3171 | 3190 | N/A | N/A | AGCTACCGTGTC | 84 | 789 |
| | | | | | GCTGCCCC | | |
| 942678 | 3177 | 3196 | N/A | N/A | ACGGCTAGCTAC | 78 | 790 |
| | | | | | CGTGTCGC | | |
| 942684 | 3191 | 3210 | N/A | N/A | AAGTTCTCCAAT | 70 | 791 |
| | | | | | CGACGGCT | | |
| 942690 | 3232 | 3251 | N/A | N/A | GCGCCGTGTTCC | 108 | 792 |
| | | | | | ATTTATGA | | |
| 942696 | 3306 | 3325 | N/A | N/A | GCCGGTTCCATC | 109 | 793 |
| | | | | | TCAGTCCC | | |
| 942702 | 3313 | 3332 | N/A | N/A | CCCCACCGCCGG | 101 | 794 |
| | | | | | TTCCATCT | | |
| 942708 | 3384 | 3403 | N/A | N/A | TCCCCAGGTCGG | 87 | 795 |
| | | | | | CCTCCATA | | |
| 942714 | 3557 | 3576 | N/A | N/A | ACCGCCAGTGAG | 96 | 796 |
| | | | | | GACTCCTC | | |
| 942720 | 3572 | 3591 | N/A | N/A | AGAAACTGTCAA | 73 | 797 |
| | | | | | TCAACCGC | | |
| 942726 | 3789 | 3808 | N/A | N/A | TCAAATCGCTGT | 121 | 798 |
| | | | | | TCAGAGCC | | |
| 942732 | 4220 | 4239 | N/A | N/A | TGCCCCGTGTCT | 88 | 799 |
| | | | | | GGTATTCA | | |
| 942738 | 4290 | 4309 | N/A | N/A | GCATGTATTGAG | 111 | 800 |
| | | | | | TGTCCTTG | | |
| 942744 | 4614 | 4633 | N/A | N/A | GAGTCGGTTTAA | 80 | 801 |
| | | | | | TCACTTGG | | |
| 942750 | 4700 | 4719 | N/A | N/A | CCCCGTCCAGGC | 117 | 802 |
| | | | | | ATCTAGTA | | |
| 942756 | 4710 | 4729 | N/A | N/A | GTCCTTCTGACC | 89 | 803 |
| | | | | | CCGTCCAG | | |
| 942762 | 4738 | 4757 | N/A | N/A | GTGTGGAACAAG | 81 | 804 |
| | | | | | TTCAAGGT | | |
| 942768 | 4980 | 4999 | N/A | N/A | TATAGCCGCCCA | 108† | 805 |
| | | | | | CCAGGAGG | | |
| 942774 | 4986 | 5005 | N/A | N/A | GGGAGGTATAGC | 62† | 806 |
| | | | | | CGCCCACC | | |
| 942780 | 5158 | 5177 | N/A | N/A | CCAGGACGAGTG | 113† | 807 |
| | | | | | TGAGAGAC | | |

TABLE 16
Reduction of APOE RNA by 5-10-5 MOE gapmers
with mixed PO/PS internucleoside linkages at
a concentration of 5000 nM in transgenic
primary mouse hepatocytes plated at 15,000
cells per well

| | SEQ | SEQ | SEQ | SEQ | | | |
|---|---|---|---|---|---|---|---|
| | ID | ID | ID | ID | | | |
| | No: | No: | No: | No: | | | |
| Com- | 1 | 1 | 2 | 2 | | APOE | SEQ |
| pound | Start | Stop | Start | Stop | Sequence | (% | ID |
| Number | Site | Site | Site | Site | (5′ to 3′) | UTC) | NO |
| 689046 | 6364 | 6381 | 1266 | 1283 | GGTGAATCTTTA | 6 | 478 |
| | | | | | TTAAAC | | |
| 708024 | 6371 | 6390 | 1273 | 1292 | GTGAAACTTGGT | 14 | 77 |
| | | | | | GAATCTTT | | |
| 708026 | 4879 | 4898 | 361 | 380 | AGTGTCTGCACC | 7† | 35 |
| | | | | | CAGCGCAG | | |
| 708030 | 4864 | 4883 | 346 | 365 | CGCAGGTAATCC | 58† | 32 |
| | | | | | CAAAAGCG | | |
| 942334 | 2750 | 2769 | 2 | 21 | TTATAGGGCTCC | 110 | 808 |
| | | | | | CCCTGTCC | | |
| 942340 | 2756 | 2775 | 8 | 27 | GTCCAATTATAG | 115 | 809 |
| | | | | | GGCTCCCC | | |
| 942346 | 2763 | 2782 | 15 | 34 | CAGACTTGTCCA | 91 | 810 |
| | | | | | ATTATAGG | | |
| 942352 | 3628 | 3647 | 202 | 221 | AACGCAGCCCAC | 81 | 22 |
| | | | | | AGAACCTT | | |
| 942358 | 3639 | 3658 | 213 | 232 | ATGTGACCAGCA | 52 | 811 |
| | | | | | ACGCAGCC | | |
| 942364 | 4768 | 4787 | 250 | 269 | ACCGCTTGCTCC | 58 | 812 |
| | | | | | ACCTTGGC | | |
| 942370 | 4807 | 4826 | 289 | 308 | TCGGTCTGCTGG | 120 | 813 |
| | | | | | CGCAGCTC | | |
| 942376 | 4813 | 4832 | 295 | 314 | TGCCACTCGGTC | 185 | 814 |
| | | | | | TGCTGGCG | | |
| 942382 | 4851 | 4870 | 333 | 352 | AAAAGCGACCCA | 147† | 815 |
| | | | | | GTGCCAGT | | |
| 942388 | 4858 | 4877 | 340 | 359 | TAATCCCAAAAG | 33† | 816 |
| | | | | | CGACCCAG | | |
| 942399 | 4870 | 4889 | 352 | 371 | ACCCAGCGCAGG | 9† | 817 |
| | | | | | TAATCCCA | | |
| 942408 | 5563 | 5582 | 465 | 484 | GTTCCGATTTGT | 64 | 818 |
| | | | | | AGGCCTTC | | |
| 942413 | 5569 | 5588 | 471 | 490 | CCTCCAGTTCCG | 69 | 819 |
| | | | | | ATTTGTAG | | |
| 942419 | 5576 | 5595 | 478 | 497 | AGTTGTTCCTCC | 77 | 820 |
| | | | | | AGTTCCGA | | |
| 942425 | 5620 | 5639 | 522 | 541 | GCTCCTTGGACA | 62 | 821 |
| | | | | | GCCGTGCC | | |
| 942431 | 5680 | 5699 | 582 | 601 | GCACCAGGCGGC | 92 | 822 |
| | | | | | CGCACACG | | |
| 942437 | 5687 | 5706 | 589 | 608 | CGGTACTGCACC | 80 | 823 |
| | | | | | AGGCGGCC | | |
| 942443 | 5693 | 5712 | 595 | 614 | TCGCCGCGGTAC | 107 | 824 |
| | | | | | TGCACCAG | | |
| 942449 | 5719 | 5738 | 621 | 640 | TGCTCTGGCCGA | 84 | 825 |
| | | | | | GCATGGCC | | |
| 942455 | 5726 | 5745 | 628 | 647 | TCCTCGGTGCTC | 105 | 826 |
| | | | | | TGGCCGAG | | |
| 942461 | 5748 | 5767 | 650 | 669 | GGAGGCGAGGCG | 83 | 827 |
| | | | | | CACCCGCA | | |
| 942467 | 5766 | 5785 | 668 | 687 | ACGCAGCTTGCG | 98 | 828 |
| | | | | | CAGGTGGG | | |
| 942473 | 5773 | 5792 | 675 | 694 | GCCGCTTACGCA | 78 | 829 |
| | | | | | GCTTGCGC | | |
| 942479 | 5779 | 5798 | 681 | 700 | GGAGGAGCCGCT | 75 | 830 |
| | | | | | TACGCAGC | | |
| 942485 | 5785 | 5804 | 687 | 706 | CATCGCGGAGGA | 79 | 831 |
| | | | | | GCCGCTTA | | |
| 942491 | 5792 | 5811 | 694 | 713 | TCATCGGCATCG | 106 | 832 |
| | | | | | CGGAGGAG | | |
| 942497 | 5798 | 5817 | 700 | 719 | TGCAGGTCATCG | 51 | 833 |
| | | | | | GCATCGCG | | |
| 942502 | 5828 | 5847 | 730 | 749 | GCCCCGGCCTGG | 59 | 53 |
| | | | | | TACACTGC | | |
| 942508 | 5834 | 5853 | 736 | 755 | TCGCGGGCCCCG | 79 | 834 |
| | | | | | GCCTGGTA | | |
| 942514 | 5903 | 5922 | 805 | 824 | CGCACGCGGCCC | 54 | 835 |
| | | | | | TGTTCCAC | | |
| 942520 | 5910 | 5929 | 812 | 831 | GGCGGCCCGCAC | 57 | 836 |
| | | | | | GCGGCCCT | | |
| 942526 | 5916 | 5935 | 818 | 837 | CACAGTGGCGGC | 81 | 837 |
| | | | | | CCGCACGC | | |
| 942532 | 5943 | 5962 | 845 | 864 | CTGTAGCGGCTG | 87 | 838 |
| | | | | | GCCGGCCA | | |
| 942538 | 5949 | 5968 | 851 | 870 | CCGCTCCTGTAG | 82 | 839 |
| | | | | | CGGCTGGC | | |
| 942544 | 5993 | 6012 | 895 | 914 | ATCTCCTCCATC | 74 | 840 |
| | | | | | CGCGCGCG | | |
| 942550 | 6011 | 6030 | 913 | 932 | TCGCGGGTCCGG | 82 | 841 |
| | | | | | CTGCCCAT | | |
| 942556 | 6017 | 6036 | 919 | 938 | AGGCGGTCGCGG | 91 | 842 |
| | | | | | GTCCGGCT | | |
| 942562 | 6057 | 6076 | 959 | 978 | CTTGGCGCGCAC | 86 | 843 |
| | | | | | CTCCGCCA | | |
| 942568 | 6064 | 6083 | 966 | 985 | CCTCCAGCTTGG | 58 | 844 |
| | | | | | CGCGCACC | | |
| 942574 | 6126 | 6145 | 1028 | 1047 | GAACCAGCTCTT | 79 | 845 |
| | | | | | GAGGCGGG | | |
| 942580 | 6132 | 6151 | 1034 | 1053 | GGGCTCGAACCA | 111 | 846 |
| | | | | | GCTCTTGA | | |
| 942585 | 6252 | 6271 | 1154 | 1173 | CATGGCTGCAGG | 16 | 847 |
| | | | | | CTTCGGCG | | |
| 942589 | 6301 | 6320 | 1203 | 1222 | CCCGCTGCAGGC | 84 | 848 |
| | | | | | TGCGCGGA | | |
| 942595 | 6350 | 6369 | 1252 | 1271 | TTAAACTAGGGT | 47 | 849 |
| | | | | | CCACCCCA | | |
| 942601 | 2834 | 2853 | 86 | 105 | TGCGCTTCTCAC | 64 | 850 |
| | | | | | CGGCTCCT | | |
| 942607 | 2841 | 2860 | 93 | 112 | CCCCGACTGCGC | 75 | 851 |
| | | | | | TTCTCACC | | |
| 942613 | 2847 | 2866 | 99 | 118 | CCGTGCCCCCGA | 75 | 852 |
| | | | | | CTGCGCTT | | |
| 942619 | 2856 | 2875 | 108 | 127 | AGCTCATCCCCG | 35 | 853 |
| | | | | | TGCCCCCG | | |
| 942625 | 3449 | 3468 | N/A | N/A | ATTTACCAAGCC | 94 | 854 |
| | | | | | GCCCCCAA | | |
| 942631 | 3455 | 3474 | N/A | N/A | CAGCACATTTAC | 81 | 855 |
| | | | | | CAAGCCGC | | |
| 942637 | 3497 | 3516 | N/A | N/A | AGCCTTCCAAGC | 105 | 856 |
| | | | | | CTTGTTGC | | |
| 942643 | 2927 | 2946 | N/A | N/A | CCGAGTAGCTCT | 142 | 857 |
| | | | | | CCTGAGAC | | |
| 942649 | 2933 | 2952 | N/A | N/A | CCGACCCCGAGT | 56 | 858 |
| | | | | | AGCTCTCC | | |
| 942655 | 3030 | 3049 | N/A | N/A | CCCACCTTCTAG | 84 | 859 |
| | | | | | CGGGTCGG | | |
| 942661 | 3071 | 3090 | N/A | N/A | TCCTGCTATGGC | 123 | 860 |
| | | | | | TTACATCC | | |
| 942667 | 3149 | 3168 | N/A | N/A | GCTCCCCAGTTA | 64 | 861 |
| | | | | | TGGAGATC | | |
| 942673 | 3172 | 3191 | N/A | N/A | TAGCTACCGTGT | 95 | 862 |
| | | | | | CGCTGCCC | | |
| 942679 | 3178 | 3197 | N/A | N/A | GACGGCTAGCTA | 67 | 863 |
| | | | | | CCGTGTCG | | |
| 942685 | 3192 | 3211 | N/A | N/A | AAAGTTCTCCAA | 74 | 864 |
| | | | | | TCGACGGC | | |
| 942691 | 3248 | 3267 | N/A | N/A | CCAACCTCACAG | 81 | 865 |
| | | | | | TTAAGCGC | | |
| 942697 | 3307 | 3326 | N/A | N/A | CGCCGGTTCCAT | 93 | 866 |
| | | | | | CTCAGTCC | | |
| 942703 | 3314 | 3333 | N/A | N/A | TCCCCACCGCCG | 60 | 867 |
| | | | | | GTTCCATC | | |
| 942709 | 3385 | 3404 | N/A | N/A | ATCCCCAGGTCG | 59 | 868 |
| | | | | | GCCTCCAT | | |
| 942715 | 3558 | 3577 | N/A | N/A | AACCGCCAGTGA | 61 | 869 |
| | | | | | GGACTCCT | | |
| 942721 | 3652 | 3671 | N/A | N/A | ATACCTGCCAGG | 87 | 870 |
| | | | | | AATGTGAC | | |
| 942727 | 4198 | 4217 | N/A | N/A | ATCTGCCTGCAA | 68 | 871 |
| | | | | | TGCATTAG | | |
| 942733 | 4222 | 4241 | N/A | N/A | GCTGCCCCGTGT | 78 | 872 |
| | | | | | CTGGTATT | | |
| 942739 | 4298 | 4317 | N/A | N/A | GCGGAAAAGCAT | 65 | 873 |
| | | | | | GTATTGAG | | |
| 942745 | 4616 | 4635 | N/A | N/A | GGGAGTCGGTTT | 71 | 874 |
| | | | | | AATCACTT | | |
| 942751 | 4701 | 4720 | N/A | N/A | ACCCCGTCCAGG | 175 | 875 |
| | | | | | CATCTAGT | | |
| 942757 | 4711 | 4730 | N/A | N/A | GGTCCTTCTGAC | 79 | 876 |
| | | | | | CCCGTCCA | | |
| 942763 | 4974 | 4993 | N/A | N/A | CGCCCACCAGGA | 82† | 877 |
| | | | | | GGGTCAAG | | |
| 942769 | 4981 | 5000 | N/A | N/A | GTATAGCCGCCC | 96† | 878 |
| | | | | | ACCAGGAG | | |
| 942775 | 5030 | 5049 | N/A | N/A | CCCCCCAAGACT | 121† | 879 |
| | | | | | TAGCGACA | | |
| 942781 | 5490 | 5509 | N/A | N/A | TGTCGCACAGTG | 75† | 880 |
| | | | | | GGAGGCGG | | |

TABLE 17
Reduction of APOE RNA by 5-10-5 MOE gapmers
with mixed PO/PS internucleoside linkages at
a concentration of 5000 nM in transgenic
primary mouse hepatocytes plated at 15,000
cells per well

| | SEQ | SEQ | SEQ | SEQ | | | |
|---|---|---|---|---|---|---|---|
| | ID | ID | ID | ID | | | |
| | No: | No: | No: | No: | | | |
| Com- | 1 | 1 | 2 | 2 | | APOE | SEQ |
| pound | Start | Stop | Start | Stop | Sequence | (% | ID |
| Number | Site | Site | Site | Site | (5′ to 3′) | UTC) | NO |
| 689046 | 6364 | 6381 | 1266 | 1283 | GGTGAATCTTTA | 10 | 478 |
| | | | | | TTAAAC | | |
| 708023 | 5799 | 5818 | 701 | 720 | CTGCAGGTCATC | 86 | 50 |
| | | | | | GGCATCGC | | |
| 708024 | 6371 | 6390 | 1273 | 1292 | GTGAAACTTGGT | 11 | 77 |
| | | | | | GAATCTTT | | |
| 708028 | 4932 | 4951 | 414 | 433 | TCAGTTCCTGGG | 41† | 39 |
| | | | | | TGACCTGG | | |
| 942335 | 2751 | 2770 | 3 | 22 | ATTATAGGGCTC | 81 | 881 |
| | | | | | CCCCTGTC | | |
| 942341 | 2757 | 2776 | 9 | 28 | TGTCCAATTATA | 91 | 882 |
| | | | | | GGGCTCCC | | |
| 942347 | 2768 | 2787 | 20 | 39 | GATCCCAGACTT | 91 | 883 |
| | | | | | GTCCAATT | | |
| 942353 | 3630 | 3649 | 204 | 223 | GCAACGCAGCCC | 63 | 884 |
| | | | | | ACAGAACC | | |
| 942359 | 3640 | 3659 | 214 | 233 | AATGTGACCAGC | 55 | 885 |
| | | | | | AACGCAGC | | |
| 942365 | 4769 | 4788 | 251 | 270 | CACCGCTTGCTC | 88 | 886 |
| | | | | | CACCTTGG | | |
| 942371 | 4808 | 4827 | 290 | 309 | CTCGGTCTGCTG | 101 | 887 |
| | | | | | GCGCAGCT | | |
| 942377 | 4846 | 4865 | 328 | 347 | CGACCCAGTGCC | 69† | 888 |
| | | | | | AGTTCCCA | | |
| 942383 | 4853 | 4872 | 335 | 354 | CCAAAAGCGACC | 47† | 889 |
| | | | | | CAGTGCCA | | |
| 942389 | 4859 | 4878 | 341 | 360 | GTAATCCCAAAA | 43† | 890 |
| | | | | | GCGACCCA | | |
| 942394 | 4865 | 4884 | 347 | 366 | GCGCAGGTAATC | 22† | 891 |
| | | | | | CCAAAAGC | | |
| 942400 | 4871 | 4890 | 353 | 372 | CACCCAGCGCAG | 24† | 892 |
| | | | | | GTAATCCC | | |
| 942409 | 5564 | 5583 | 466 | 485 | AGTTCCGATTTG | 65 | 893 |
| | | | | | TAGGCCTT | | |
| 942414 | 5570 | 5589 | 472 | 491 | TCCTCCAGTTCC | 55 | 894 |
| | | | | | GATTTGTA | | |
| 942420 | 5577 | 5596 | 479 | 498 | CAGTTGTTCCTC | 54 | 895 |
| | | | | | CAGTTCCG | | |
| 942426 | 5621 | 5640 | 523 | 542 | AGCTCCTTGGAC | 91 | 896 |
| | | | | | AGCCGTGC | | |
| 942432 | 5681 | 5700 | 583 | 602 | TGCACCAGGCGG | 81 | 897 |
| | | | | | CCGCACAC | | |
| 942438 | 5688 | 5707 | 590 | 609 | GCGGTACTGCAC | 72 | 45 |
| | | | | | CAGGCGGC | | |
| 942444 | 5694 | 5713 | 596 | 615 | CTCGCCGCGGTA | 75 | 898 |
| | | | | | CTGCACCA | | |
| 942450 | 5720 | 5739 | 622 | 641 | GTGCTCTGGCCG | 76 | 899 |
| | | | | | AGCATGGC | | |
| 942456 | 5727 | 5746 | 629 | 648 | CTCCTCGGTGCT | 64 | 900 |
| | | | | | CTGGCCGA | | |
| 942462 | 5749 | 5768 | 651 | 670 | GGGAGGCGAGGC | 114 | 901 |
| | | | | | GCACCCGC | | |
| 942468 | 5767 | 5786 | 669 | 688 | TACGCAGCTTGC | 65 | 902 |
| | | | | | GCAGGTGG | | |
| 942474 | 5774 | 5793 | 676 | 695 | AGCCGCTTACGC | 87 | 903 |
| | | | | | AGCTTGCG | | |
| 942480 | 5780 | 5799 | 682 | 701 | CGGAGGAGCCGC | 64 | 904 |
| | | | | | TTACGCAG | | |
| 942486 | 5786 | 5805 | 688 | 707 | GCATCGCGGAGG | 100 | 905 |
| | | | | | AGCCGCTT | | |
| 942492 | 5793 | 5812 | 695 | 714 | GTCATCGGCATC | 83 | 906 |
| | | | | | GCGGAGGA | | |
| 942503 | 5829 | 5848 | 731 | 750 | GGCCCCGGCCTG | 93 | 907 |
| | | | | | GTACACTG | | |
| 942509 | 5857 | 5876 | 759 | 778 | CGCTGAGGCCGC | 81 | 908 |
| | | | | | GCTCGGCG | | |
| 942515 | 5904 | 5923 | 806 | 825 | CCGCACGCGGCC | 63 | 909 |
| | | | | | CTGTTCCA | | |
| 942521 | 5911 | 5930 | 813 | 832 | TGGCGGCCCGCA | 80 | 910 |
| | | | | | CGCGGCCC | | |
| 942527 | 5917 | 5936 | 819 | 838 | CCACAGTGGCGG | 62 | 911 |
| | | | | | CCCGCACG | | |
| 942533 | 5944 | 5963 | 846 | 865 | CCTGTAGCGGCT | 72 | 912 |
| | | | | | GGCCGGCC | | |
| 942539 | 5952 | 5971 | 854 | 873 | GGCCCGCTCCT | 94 | 913 |
| | | | | | GTAGCGGCT | | |
| 942545 | 5994 | 6013 | 896 | 915 | CATCTCCTCCAT | 64 | 914 |
| | | | | | CCGCGCGC | | |
| 942551 | 6012 | 6031 | 914 | 933 | GTCGCGGGTCCG | 80 | 915 |
| | | | | | GCTGCCCA | | |
| 942557 | 6018 | 6037 | 920 | 939 | CAGGCGGTCGCG | 90 | 916 |
| | | | | | GGTCCGGC | | |
| 942563 | 6058 | 6077 | 960 | 979 | GCTTGGCGCGCA | 70 | 917 |
| | | | | | CCTCCGCC | | |
| 942569 | 6065 | 6084 | 967 | 986 | TCCTCCAGCTTG | 82 | 918 |
| | | | | | GCGCGCAC | | |
| 942575 | 6127 | 6146 | 1029 | 1048 | CGAACCAGCTCT | 70 | 64 |
| | | | | | TGAGGCGG | | |
| 942581 | 6230 | 6249 | 1132 | 1151 | CAGTGATTGTCG | 89 | 68 |
| | | | | | CTGGGCAC | | |
| 942586 | 6253 | 6272 | 1155 | 1174 | GCATGGCTGCAG | 6 | 919 |
| | | | | | GCTTCGGC | | |
| 942590 | 6302 | 6321 | 1204 | 1223 | TCCCGCTGCAGG | 54 | 920 |
| | | | | | CTGCGCGG | | |
| 942596 | 6351 | 6370 | 1253 | 1272 | ATTAAACTAGGG | 42 | 921 |
| | | | | | TCCACCCC | | |
| 942602 | 2836 | 2855 | 88 | 107 | ACTGCGCTTCTC | 102 | 922 |
| | | | | | ACCGGCTC | | |
| 942608 | 2842 | 2861 | 94 | 113 | CCCCCGACTGCG | 82 | 923 |
| | | | | | CTTCTCAC | | |
| 942614 | 2848 | 2867 | 100 | 119 | CCCGTGCCCCCG | 137 | 924 |
| | | | | | ACTGCGCT | | |
| 942620 | 3421 | 3440 | N/A | N/A | CTATTTAACTCC | 67 | 925 |
| | | | | | CTCCTGGT | | |
| 942626 | 3450 | 3469 | N/A | N/A | CATTTACCAAGC | 74 | 926 |
| | | | | | CGCCCCCA | | |
| 942632 | 3456 | 3475 | N/A | N/A | CCAGCACATTTA | 108 | 927 |
| | | | | | CCAAGCCG | | |
| 942638 | 3498 | 3517 | N/A | N/A | TAGCCTTCCAAG | 74 | 928 |
| | | | | | CCTTGTTG | | |
| 942644 | 2928 | 2947 | N/A | N/A | CCCGAGTAGCTC | 95 | 929 |
| | | | | | TCCTGAGA | | |
| 942650 | 2934 | 2953 | N/A | N/A | CCCGACCCCGAG | 71 | 930 |
| | | | | | TAGCTCTC | | |
| 942656 | 3031 | 3050 | N/A | N/A | CCCCACCTTCTA | 75 | 931 |
| | | | | | GCGGGTCG | | |
| 942662 | 3073 | 3092 | N/A | N/A | AGTCCTGCTATG | 97 | 932 |
| | | | | | GCTTACAT | | |
| 942668 | 3167 | 3186 | N/A | N/A | ACCGTGTCGCTG | 86 | 81 |
| | | | | | CCCCTGGC | | |
| 942674 | 3173 | 3192 | N/A | N/A | CTAGCTACCGTG | 93 | 933 |
| | | | | | TCGCTGCC | | |
| 942680 | 3179 | 3198 | N/A | N/A | CGACGGCTAGCT | 124 | 934 |
| | | | | | ACCGTGTC | | |
| 942686 | 3195 | 3214 | N/A | N/A | TTTAAAGTTCTC | 78 | 935 |
| | | | | | CAATCGAC | | |
| 942692 | 3292 | 3311 | N/A | N/A | AGTCCCAGTCTC | 73 | 936 |
| | | | | | GCATTCCT | | |
| 942698 | 3308 | 3327 | N/A | N/A | CCGCCGGTTCCA | 74 | 937 |
| | | | | | TCTCAGTC | | |
| 942704 | 3375 | 3394 | N/A | N/A | CGGCCTCCATAG | 108 | 938 |
| | | | | | AAAATTCC | | |
| 942710 | 3509 | 3528 | N/A | N/A | TCACCCCAGGTT | 85 | 939 |
| | | | | | AGCCTTCC | | |
| 942716 | 3559 | 3578 | N/A | N/A | CAACCGCCAGTG | 78 | 940 |
| | | | | | AGGACTCC | | |
| 942722 | 3674 | 3693 | N/A | N/A | GAACCGAGCAAG | 72 | 941 |
| | | | | | CCCCGCCC | | |
| 942728 | 4212 | 4231 | N/A | N/A | GTCTGGTATTCA | 102 | 942 |
| | | | | | CTATCTGC | | |
| 942734 | 4223 | 4242 | N/A | N/A | AGCTGCCCCGTG | 79 | 943 |
| | | | | | TCTGGTAT | | |
| 942740 | 4303 | 4322 | N/A | N/A | GCCCAGCGGAAA | 85 | 944 |
| | | | | | AGCATGTA | | |
| 942746 | 4694 | 4713 | N/A | N/A | CCAGGCATCTAG | 99 | 945 |
| | | | | | TACCTAGG | | |
| 942752 | 4702 | 4721 | N/A | N/A | GACCCCGTCCAG | 78 | 946 |
| | | | | | GCATCTAG | | |
| 942758 | 4712 | 4731 | N/A | N/A | GGGTCCTTCTGA | 121 | 947 |
| | | | | | CCCCGTCC | | |
| 942764 | 4975 | 4994 | N/A | N/A | CCGCCCACCAGG | 87† | 948 |
| | | | | | AGGGTCAA | | |
| 942770 | 4982 | 5001 | N/A | N/A | GGTATAGCCGCC | 120† | 949 |
| | | | | | CACCAGGA | | |
| 942776 | 5031 | 5050 | N/A | N/A | GCCCCCCAAGAC | 60† | 950 |
| | | | | | TTAGCGAC | | |
| 942782 | 5491 | 5510 | N/A | N/A | GTGTCGCACAGT | 110† | 951 |
| | | | | | GGGAGGCG | | |

TABLE 18
Reduction of APOE RNA by 5-10-5 MOE gapmers
with mixed PO/PS internucleoside linkages at
a concentration of 5000 nM in transgenic
primary mouse hepatocytes plated at 15,000
cells per well

| | SEQ | SEQ | SEQ | SEQ | | | |
|---|---|---|---|---|---|---|---|
| | ID | ID | ID | ID | | | |
| | No: | No: | No: | No: | | | |
| Com- | 1 | 1 | 2 | 2 | | APOE | SEQ |
| pound | Start | Stop | Start | Stop | Sequence | (% | ID |
| Number | Site | Site | Site | Site | (5′ to 3′) | UTC) | NO |
| 689046 | 6364 | 6381 | 1266 | 1283 | GGTGAATCTTTA | 3 | 478 |
| | | | | | TTAAAC | | |
| 708021 | 6254 | 6273 | 1156 | 1175 | CGCATGGCTGCA | 5 | 70 |
| | | | | | GGCTTCGG | | |
| 708024 | 6371 | 6390 | 1273 | 1292 | GTGAAACTTGGT | 9 | 77 |
| | | | | | GAATCTTT | | |
| 708025 | 5565 | 5584 | 467 | 486 | CAGTTCCGATTT | 70 | 42 |
| | | | | | GTAGGCCT | | |
| 708029 | 4872 | 4891 | 354 | 373 | GCACCCAGCGCA | 6† | 33 |
| | | | | | GGTAATCC | | |
| 942336 | 2752 | 2771 | 4 | 23 | AATTATAGGGCT | 112 | 952 |
| | | | | | CCCCCTGT | | |
| 942342 | 2759 | 2778 | 11 | 30 | CTTGTCCAATTA | 142 | 953 |
| | | | | | TAGGGCTC | | |
| 942348 | 2769 | 2788 | 21 | 40 | GGATCCCAGACT | 105 | 954 |
| | | | | | TGTCCAAT | | |
| 942354 | 3635 | 3654 | 209 | 228 | GACCAGCAACGC | 51 | 955 |
| | | | | | AGCCCACA | | |
| 942360 | 3641 | 3660 | 215 | 234 | GAATGTGACCAG | 65 | 956 |
| | | | | | CAACGCAG | | |
| 942366 | 4774 | 4793 | 256 | 275 | GTCTCCACCGCT | 114 | 957 |
| | | | | | TGCTCCAC | | |
| 942372 | 4809 | 4828 | 291 | 310 | ACTCGGTCTGCT | 113 | 958 |
| | | | | | GGCGCAGC | | |
| 942378 | 4847 | 4866 | 329 | 348 | GCGACCCAGTGC | 61† | 959 |
| | | | | | CAGTTCCC | | |
| 942384 | 4854 | 4873 | 336 | 355 | CCCAAAAGCGAC | 17† | 30 |
| | | | | | CCAGTGCC | | |
| 942390 | 4860 | 4879 | 342 | 361 | GGTAATCCCAAA | 32† | 960 |
| | | | | | AGCGACCC | | |
| 942395 | 4866 | 4885 | 348 | 367 | AGCGCAGGTAAT | 42† | 961 |
| | | | | | CCCAAAAG | | |
| 942404 | 5559 | 5578 | 461 | 480 | CGATTTGTAGGC | 136 | 41 |
| | | | | | CTTCAACT | | |
| 942415 | 5571 | 5590 | 473 | 492 | TTCCTCCAGTTC | 82 | 962 |
| | | | | | CGATTTGT | | |
| 942421 | 5581 | 5600 | 483 | 502 | GGGTCAGTTGTT | 78 | 963 |
| | | | | | CCTCCAGT | | |
| 942427 | 5657 | 5676 | 559 | 578 | TCCATGTCCGCG | 55 | 964 |
| | | | | | CCCAGCCG | | |
| 942433 | 5683 | 5702 | 585 | 604 | ACTGCACCAGGC | 56 | 965 |
| | | | | | GGCCGCAC | | |
| 942439 | 5689 | 5708 | 591 | 610 | CGCGGTACTGCA | 84 | 966 |
| | | | | | CCAGGCGG | | |
| 942445 | 5695 | 5714 | 597 | 616 | CCTCGCCGCGGT | 64 | 967 |
| | | | | | ACTGCACC | | |
| 942451 | 5722 | 5741 | 624 | 643 | CGGTGCTCTGGC | 89 | 968 |
| | | | | | CGAGCATG | | |
| 942457 | 5738 | 5757 | 640 | 659 | CGCACCCGCAGC | 63 | 969 |
| | | | | | TCCTCGGT | | |
| 942463 | 5750 | 5769 | 652 | 671 | TGGGAGGCGAGG | 123 | 970 |
| | | | | | CGCACCCG | | |
| 942469 | 5768 | 5787 | 670 | 689 | TTACGCAGCTTG | 83 | 971 |
| | | | | | CGCAGGTG | | |
| 942475 | 5775 | 5794 | 677 | 696 | GAGCCGCTTACG | 100 | 49 |
| | | | | | CAGCTTGC | | |
| 942481 | 5781 | 5800 | 683 | 702 | GCGGAGGAGCCG | 77 | 972 |
| | | | | | CTTACGCA | | |
| 942487 | 5787 | 5806 | 689 | 708 | GGCATCGCGGAG | 83 | 973 |
| | | | | | GAGCCGCT | | |
| 942493 | 5794 | 5813 | 696 | 715 | GGTCATCGGCAT | 64 | 974 |
| | | | | | CGCGGAGG | | |
| 942498 | 5800 | 5819 | 702 | 721 | TCTGCAGGTCAT | 63 | 975 |
| | | | | | CGGCATCG | | |
| 942504 | 5830 | 5849 | 732 | 751 | GGGCCCCGGCCT | 64 | 976 |
| | | | | | GGTACACT | | |
| 942510 | 5858 | 5877 | 760 | 779 | GCGCTGAGGCCG | 127 | 977 |
| | | | | | CGCTCGGC | | |
| 942516 | 5905 | 5924 | 807 | 826 | CCCGCACGCGGC | 100 | 978 |
| | | | | | CCTGTTCC | | |
| 942522 | 5912 | 5931 | 814 | 833 | GTGGCGGCCCGC | 98 | 979 |
| | | | | | ACGCGGCC | | |
| 942528 | 5918 | 5937 | 820 | 839 | CCCACAGTGGCG | 70 | 980 |
| | | | | | GCCCGCAC | | |
| 942534 | 5945 | 5964 | 847 | 866 | TCCTGTAGCGGC | 115 | 981 |
| | | | | | TGGCCGGC | | |
| 942540 | 5953 | 5972 | 855 | 874 | GGGCCCGCTCCT | 79 | 982 |
| | | | | | GTAGCGGC | | |
| 942546 | 5995 | 6014 | 897 | 916 | CCATCTCCTCCA | 55 | 983 |
| | | | | | TCCGCGCG | | |
| 942552 | 6013 | 6032 | 915 | 934 | GGTCGCGGGTCC | 45 | 984 |
| | | | | | GGCTGCCC | | |
| 942558 | 6019 | 6038 | 921 | 940 | CCAGGCGGTCGC | 100 | 985 |
| | | | | | GGGTCCGG | | |
| 942564 | 6059 | 6078 | 961 | 980 | AGCTTGGCGCGC | 50 | 986 |
| | | | | | ACCTCCGC | | |
| 942570 | 6119 | 6138 | 1021 | 1040 | CTCTTGAGGCGG | 87 | 987 |
| | | | | | GCCTGGAA | | |
| 942576 | 6128 | 6147 | 1030 | 1049 | TCGAACCAGCTC | 76 | 988 |
| | | | | | TTGAGGCG | | |
| 942582 | 6231 | 6250 | 1133 | 1152 | TCAGTGATTGTC | 53 | 989 |
| | | | | | GCTGGGCA | | |
| 942591 | 6305 | 6324 | 1207 | 1226 | GTCTCCCGCTGC | 21 | 990 |
| | | | | | AGGCTGCG | | |
| 942597 | 6353 | 6372 | 1255 | 1274 | TTATTAAACTAG | 34 | 76 |
| | | | | | GGTCCACC | | |
| 942603 | 2837 | 2856 | 89 | 108 | GACTGCGCTTCT | 86 | 991 |
| | | | | | CACCGGCT | | |
| 942609 | 2843 | 2862 | 95 | 114 | GCCCCCGACTGC | 59 | 992 |
| | | | | | GCTTCTCA | | |
| 942615 | 2850 | 2869 | 102 | 121 | TCCCCGTGCCCC | 65 | 993 |
| | | | | | CGACTGCG | | |
| 942621 | 3442 | 3461 | N/A | N/A | AAGCCGCCCCCA | 55 | 994 |
| | | | | | ACCCATTC | | |
| 942627 | 3451 | 3470 | N/A | N/A | ACATTTACCAAG | 41 | 995 |
| | | | | | CCGCCCCC | | |
| 942633 | 3474 | 3493 | N/A | N/A | ATCTGCAACAGC | 151 | 996 |
| | | | | | CTAATCCC | | |
| 942639 | 3500 | 3519 | N/A | N/A | GTTAGCCTTCCA | 99 | 997 |
| | | | | | AGCCTTGT | | |
| 942645 | 2929 | 2948 | N/A | N/A | CCCCGAGTAGCT | 87 | 998 |
| | | | | | CTCCTGAG | | |
| 942651 | 2935 | 2954 | N/A | N/A | GCCCGACCCCGA | 56 | 999 |
| | | | | | GTAGCTCT | | |
| 942657 | 3032 | 3051 | N/A | N/A | ACCCCACCTTCT | 62 | 1000 |
| | | | | | AGCGGGTC | | |
| 942663 | 3075 | 3094 | N/A | N/A | GGAGTCCTGCTA | 113 | 1001 |
| | | | | | TGGCTTAC | | |
| 942669 | 3168 | 3187 | N/A | N/A | TACCGTGTCGCT | 88 | 1002 |
| | | | | | GCCCCTGG | | |
| 942675 | 3174 | 3193 | N/A | N/A | GCTAGCTACCGT | 59 | 1003 |
| | | | | | GTCGCTGC | | |
| 942681 | 3180 | 3199 | N/A | N/A | TCGACGGCTAGC | 108 | 1004 |
| | | | | | TACCGTGT | | |
| 942687 | 3228 | 3247 | N/A | N/A | CGTGTTCCATTT | 79 | 1005 |
| | | | | | ATGAGCTA | | |
| 942693 | 3293 | 3312 | N/A | N/A | CAGTCCCAGTCT | 101 | 1006 |
| | | | | | CGCATTCC | | |
| 942699 | 3309 | 3328 | N/A | N/A | ACCGCCGGTTCC | 58 | 1007 |
| | | | | | ATCTCAGT | | |
| 942705 | 3379 | 3398 | N/A | N/A | AGGTCGGCCTCC | 70 | 1008 |
| | | | | | ATAGAAAA | | |
| 942711 | 3514 | 3533 | N/A | N/A | CGGCCTCACCCC | 70 | 1009 |
| | | | | | AGGTTAGC | | |
| 942717 | 3562 | 3581 | N/A | N/A | AATCAACCGCCA | 73 | 1010 |
| | | | | | GTGAGGAC | | |
| 942723 | 3675 | 3694 | N/A | N/A | GGAACCGAGCAA | 102 | 1011 |
| | | | | | GCCCCGCC | | |
| 942729 | 4216 | 4235 | N/A | N/A | CCGTGTCTGGTA | 83 | 1012 |
| | | | | | TTCACTAT | | |
| 942735 | 4229 | 4248 | N/A | N/A | GATCACAGCTGC | 72 | 1013 |
| | | | | | CCCGTGTC | | |
| 942741 | 4305 | 4324 | N/A | N/A | GCGCCCAGCGGA | 72 | 1014 |
| | | | | | AAAGCATG | | |
| 942747 | 4696 | 4715 | N/A | N/A | GTCCAGGCATCT | 136 | 1015 |
| | | | | | AGTACCTA | | |
| 942753 | 4703 | 4722 | N/A | N/A | TGACCCCGTCCA | 73 | 1016 |
| | | | | | GGCATCTA | | |
| 942759 | 4714 | 4733 | N/A | N/A | CAGGGTCCTTCT | 67 | 1017 |
| | | | | | GACCCCGT | | |
| 942765 | 4977 | 4996 | N/A | N/A | AGCCGCCCACCA | 44† | 1018 |
| | | | | | GGAGGGTC | | |
| 942771 | 4983 | 5002 | N/A | N/A | AGGTATAGCCGC | 128† | 1019 |
| | | | | | CCACCAGG | | |
| 942777 | 5032 | 5051 | N/A | N/A | GGCCCCCCAAGA | 61† | 1020 |
| | | | | | CTTAGCGA | | |
| 942783 | 5516 | 5535 | N/A | N/A | GCCCTGCGGCCG | 105† | 1021 |
| | | | | | AGAGGGCG | | |

TABLE 19
Reduction of APOE RNA by 5-10-5 MOE gapmers
with mixed PO/PS internucleoside linkages at
a concentration of 5000 nM in transgenic
primary mouse hepatocytes plated at 15,000
cells per well

| | SEQ | SEQ | SEQ | SEQ | | | |
|---|---|---|---|---|---|---|---|
| | ID | ID | ID | ID | | | |
| | No: | No: | No: | No: | | | |
| Com- | 1 | 1 | 2 | 2 | | APOE | SEQ |
| pound | Start | Stop | Start | Stop | Sequence | (% | ID |
| Number | Site | Site | Site | Site | (5′ to 3′) | UTC) | NO |
| 689046 | 6364 | 6381 | 1266 | 1283 | GGTGAATCTT | 6 | 478 |
| | | | | | TATTAAAC | | |
| 708024 | 6371 | 6390 | 1273 | 1292 | GTGAAACTTG | 21 | 77 |
| | | | | | GTGAATCTTT | | |
| 942337 | 2753 | 2772 | 5 | 24 | CAATTATAGG | 83 | 1022 |
| | | | | | GCTCCCCCTG | | |
| 942343 | 2760 | 2779 | 12 | 31 | ACTTGTCCAA | 94 | 1023 |
| | | | | | TTATAGGGCT | | |
| 942349 | 2783 | 2802 | 35 | 54 | TGAGTAGGAC | 99 | 1024 |
| | | | | | TCAAGGATCC | | |
| 942355 | 3636 | 3655 | 210 | 229 | TGACCAGCAA | 123 | 23 |
| | | | | | CGCAGCCCAC | | |
| 942361 | 3642 | 3661 | 216 | 235 | GGAATGTGAC | 126 | 24 |
| | | | | | CAGCAACGCA | | |
| 942367 | 4804 | 4823 | 286 | 305 | GTCTGCTGGC | 105 | 1025 |
| | | | | | GCAGCTCGGG | | |
| 942373 | 4810 | 4829 | 292 | 311 | CACTCGGTCT | 100 | 1026 |
| | | | | | GCTGGCGCAG | | |
| 942379 | 4848 | 4867 | 330 | 349 | AGCGACCCAG | 45† | 1027 |
| | | | | | TGCCAGTTCC | | |
| 942385 | 4855 | 4874 | 337 | 356 | TCCCAAAAGC | 25† | 1028 |
| | | | | | GACCCAGTGC | | |
| 942391 | 4861 | 4880 | 343 | 362 | AGGTAATCCC | 26† | 31 |
| | | | | | AAAAGCGACC | | |
| 942396 | 4867 | 4886 | 349 | 368 | CAGCGCAGGT | 33† | 1029 |
| | | | | | AATCCCAAAA | | |
| 942401 | 4873 | 4892 | 355 | 374 | TGCACCCAGC | 22† | 1030 |
| | | | | | GCAGGTAATC | | |
| 942405 | 5560 | 5579 | 462 | 481 | CCGATTTGTA | 124 | 1031 |
| | | | | | GGCCTTCAAC | | |
| 942410 | 5566 | 5585 | 468 | 487 | CCAGTTCCGA | 85 | 1032 |
| | | | | | TTTGTAGGCC | | |
| 942416 | 5572 | 5591 | 474 | 493 | GTTCCTCCAG | 73 | 1033 |
| | | | | | TTCCGATTTG | | |
| 942422 | 5616 | 5635 | 518 | 537 | CTTGGACAGC | 97 | 1034 |
| | | | | | CGTGCCCGCG | | |
| 942428 | 5660 | 5679 | 562 | 581 | TCCTCCATGT | 81 | 1035 |
| | | | | | CCGCGCCCAG | | |
| 942434 | 5684 | 5703 | 586 | 605 | TACTGCACCA | 92 | 1036 |
| | | | | | GGCGGCCGCA | | |
| 942440 | 5690 | 5709 | 592 | 611 | CCGCGGTACT | 87 | 1037 |
| | | | | | GCACCAGGCG | | |
| 942446 | 5696 | 5715 | 598 | 617 | ACCTCGCCGC | 95 | 1038 |
| | | | | | GGTACTGCAC | | |
| 942452 | 5723 | 5742 | 625 | 644 | TCGGTGCTCT | 90 | 1039 |
| | | | | | GGCCGAGCAT | | |
| 942458 | 5744 | 5763 | 646 | 665 | GCGAGGCGCA | 77 | 1040 |
| | | | | | CCCGCAGCTC | | |
| 942464 | 5759 | 5778 | 661 | 680 | TTGCGCAGGT | 144 | 1041 |
| | | | | | GGGAGGCGAG | | |
| 942470 | 5769 | 5788 | 671 | 690 | CTTACGCAGC | 135 | 1042 |
| | | | | | TTGCGCAGGT | | |
| 942476 | 5776 | 5795 | 678 | 697 | GGAGCCGCTT | 94 | 1043 |
| | | | | | ACGCAGCTTG | | |
| 942482 | 5782 | 5801 | 684 | 703 | CGCGGAGGAG | 77 | 1044 |
| | | | | | CCGCTTACGC | | |
| 942488 | 5789 | 5808 | 691 | 710 | TCGGCATCGC | 99 | 1045 |
| | | | | | GGAGGAGCCG | | |
| 942494 | 5795 | 5814 | 697 | 716 | AGGTCATCGG | 90 | 1046 |
| | | | | | CATCGCGGAG | | |
| 942499 | 5824 | 5843 | 726 | 745 | CGGCCTGGTA | 62 | 1047 |
| | | | | | CACTGCCAGG | | |
| 942505 | 5831 | 5850 | 733 | 752 | CGGGCCCCGG | 89 | 1048 |
| | | | | | CCTGGTACAC | | |
| 942511 | 5900 | 5919 | 802 | 821 | ACGCGGCCCT | 98 | 1049 |
| | | | | | GTTCCACCAG | | |
| 942517 | 5906 | 5925 | 808 | 827 | GCCCGCACGC | 68 | 1050 |
| | | | | | GGCCCTGTTC | | |
| 942523 | 5913 | 5932 | 815 | 834 | AGTGGCGGCC | 125 | 1051 |
| | | | | | CGCACGCGGC | | |
| 942529 | 5919 | 5938 | 821 | 840 | GCCCACAGTG | 91 | 55 |
| | | | | | GCGGCCCGCA | | |
| 942535 | 5946 | 5965 | 848 | 867 | CTCCTGTAGC | 92 | 1052 |
| | | | | | GGCTGGCCGG | | |
| 942541 | 5954 | 5973 | 856 | 875 | TGGGCCCGCT | 82 | 1053 |
| | | | | | CCTGTAGCGG | | |
| 942547 | 6008 | 6027 | 910 | 929 | CGGGTCCGGC | 76 | 1054 |
| | | | | | TGCCCATCTC | | |
| 942553 | 6014 | 6033 | 916 | 935 | CGGTCGCGGG | 92 | 1055 |
| | | | | | TCCGGCTGCC | | |
| 942559 | 6020 | 6039 | 922 | 941 | TCCAGGCGGT | 87 | 1056 |
| | | | | | CGCGGGTCCG | | |
| 942565 | 6060 | 6079 | 962 | 981 | CAGCTTGGCG | 82 | 1057 |
| | | | | | CGCACCTCCG | | |
| 942571 | 6120 | 6139 | 1022 | 1041 | GCTCTTGAGG | 110 | 1058 |
| | | | | | CGGGCCTGGA | | |
| 942577 | 6129 | 6148 | 1031 | 1050 | CTCGAACCAG | 101 | 1059 |
| | | | | | CTCTTGAGGC | | |
| 942583 | 6232 | 6251 | 1134 | 1153 | TTCAGTGATT | 78 | 1060 |
| | | | | | GTCGCTGGGC | | |
| 942587 | 6255 | 6274 | 1157 | 1176 | TCGCATGGCT | 10 | 1061 |
| | | | | | GCAGGCTTCG | | |
| 942592 | 6341 | 6360 | 1243 | 1262 | GGTCCACCCC | 80 | 1062 |
| | | | | | AGGAGGACGG | | |
| 942598 | 6372 | 6391 | 1274 | 1293 | CGTGAAACTT | 15 | 1063 |
| | | | | | GGTGAATCTT | | |
| 942604 | 2838 | 2857 | 90 | 109 | CGACTGCGCT | 64 | 1064 |
| | | | | | TCTCACCGGC | | |
| 942610 | 2844 | 2863 | 96 | 115 | TGCCCCCGAC | 68 | 1065 |
| | | | | | TGCGCTTCTC | | |
| 942616 | 2851 | 2870 | 103 | 122 | ATCCCCGTGC | 69 | 1066 |
| | | | | | CCCCGACTGC | | |
| 942622 | 3443 | 3462 | N/A | N/A | CAAGCCGCCC | 76 | 1067 |
| | | | | | CCAACCCATT | | |
| 942628 | 3452 | 3471 | N/A | N/A | CACATTTACC | 94 | 1068 |
| | | | | | AAGCCGCCCC | | |
| 942634 | 3490 | 3509 | N/A | N/A | CAAGCCTTGT | 104 | 1069 |
| | | | | | TGCATTATCT | | |
| 942640 | 3501 | 3520 | N/A | N/A | GGTTAGCCTT | 87 | 1070 |
| | | | | | CCAAGCCTTG | | |
| 942646 | 2930 | 2949 | N/A | N/A | ACCCCGAGTA | 126 | 1071 |
| | | | | | GCTCTCCTGA | | |
| 942652 | 2936 | 2955 | N/A | N/A | AGCCCGACCC | 85 | 1072 |
| | | | | | CGAGTAGCTC | | |
| 942658 | 3033 | 3052 | N/A | N/A | CACCCCACCT | 92 | 1073 |
| | | | | | TCTAGCGGGT | | |
| 942664 | 3076 | 3095 | N/A | N/A | TGGAGTCCTG | 90 | 1074 |
| | | | | | CTATGGCTTA | | |
| 942670 | 3169 | 3188 | N/A | N/A | CTACCGTGTC | 64 | 1075 |
| | | | | | GCTGCCCCTG | | |
| 942676 | 3175 | 3194 | N/A | N/A | GGCTAGCTAC | 73 | 1076 |
| | | | | | CGTGTCGCTG | | |
| 942682 | 3184 | 3203 | N/A | N/A | CCAATCGACG | 97 | 1077 |
| | | | | | GCTAGCTACC | | |
| 942688 | 3230 | 3249 | N/A | N/A | GCCGTGTTCC | 69 | 1078 |
| | | | | | ATTTATGAGC | | |
| 942694 | 3296 | 3315 | N/A | N/A | TCTCAGTCCC | 89 | 1079 |
| | | | | | AGTCTCGCAT | | |
| 942700 | 3310 | 3329 | N/A | N/A | CACCGCCGGT | 76 | 1080 |
| | | | | | TCCATCTCAG | | |
| 942706 | 3381 | 3400 | N/A | N/A | CCAGGTCGGC | 68 | 1081 |
| | | | | | CTCCATAGAA | | |
| 942712 | 3515 | 3534 | N/A | N/A | CCGGCCTCAC | 87 | 1082 |
| | | | | | CCCAGGTTAG | | |
| 942718 | 3564 | 3583 | N/A | N/A | TCAATCAACC | 102 | 1083 |
| | | | | | GCCAGTGAGG | | |
| 942724 | 3676 | 3695 | N/A | N/A | GGGAACCGAG | 67 | 1084 |
| | | | | | CAAGCCCCGC | | |
| 942730 | 4218 | 4237 | N/A | N/A | CCCCGTGTCT | 98 | 1085 |
| | | | | | GGTATTCACT | | |
| 942736 | 4230 | 4249 | N/A | N/A | AGATCACAGC | 117 | 1086 |
| | | | | | TGCCCCGTGT | | |
| 942742 | 4610 | 4629 | N/A | N/A | CGGTTTAATC | 91 | 1087 |
| | | | | | ACTTGGAAAG | | |
| 942748 | 4698 | 4717 | N/A | N/A | CCGTCCAGGC | 153 | 1088 |
| | | | | | ATCTAGTACC | | |
| 942754 | 4705 | 4724 | N/A | N/A | TCTGACCCCG | 95 | 1089 |
| | | | | | TCCAGGCATC | | |
| 942760 | 4715 | 4734 | N/A | N/A | TCAGGGTCCT | 87 | 1090 |
| | | | | | TCTGACCCCG | | |
| 942766 | 4978 | 4997 | N/A | N/A | TAGCCGCCCA | 87† | 1091 |
| | | | | | CCAGGAGGGT | | |
| 942772 | 4984 | 5003 | N/A | N/A | GAGGTATAGC | 91† | 1092 |
| | | | | | CGCCCACCAG | | |
| 942778 | 5033 | 5052 | N/A | N/A | AGGCCCCCCA | 65† | 1093 |
| | | | | | AGACTTAGCG | | |
| 942784 | 5517 | 5536 | N/A | N/A | CGCCCTGCGG | 98† | 1094 |
| | | | | | CCGAGAGGGC | | |

TABLE 20
Reduction of APOE RNA by 5-10-5 MOE gapmers
with mixed PO/PS internucleoside linkages at
a concentration of 5000 nM in transgenic
primary mouse hepatocytes plated at 15,000
cells per well

| | SEQ | SEQ | SEQ | SEQ | | | |
|---|---|---|---|---|---|---|---|
| | ID | ID | ID | ID | | | |
| | No: | No: | No: | No: | | | |
| Com- | 1 | 1 | 2 | 2 | | APOE | SEQ |
| pound | Start | Stop | Start | Stop | Sequence | (% | ID |
| Number | Site | Site | Site | Site | (5′ to 3′) | UTC) | NO |
| 689046 | 6364 | 6381 | 1266 | 1283 | GGTGAATCTT | 9 | 478 |
| | | | | | TATTAAAC | | |
| 708024 | 6371 | 6390 | 1273 | 1292 | GTGAAACTTG | 24 | 77 |
| | | | | | GTGAATCTTT | | |
| 942338 | 2754 | 2773 | 6 | 25 | CCAATTATAG | 75 | 1095 |
| | | | | | GGCTCCCCCT | | |
| 942344 | 2761 | 2780 | 13 | 32 | GACTTGTCCA | 69 | 1096 |
| | | | | | ATTATAGGGC | | |
| 942350 | 2784 | 2803 | 36 | 55 | CTGAGTAGGA | 99 | 1097 |
| | | | | | CTCAAGGATC | | |
| 942356 | 3637 | 3656 | 211 | 230 | GTGACCAGCA | 103 | 1098 |
| | | | | | ACGCAGCCCA | | |
| 942362 | 3643 | 3662 | 217 | 236 | AGGAATGTGA | 71 | 1099 |
| | | | | | CCAGCAACGC | | |
| 942368 | 4805 | 4824 | 287 | 306 | GGTCTGCTGG | 82 | 1100 |
| | | | | | CGCAGCTCGG | | |
| 942374 | 4811 | 4830 | 293 | 312 | CCACTCGGTC | 70 | 1101 |
| | | | | | TGCTGGCGCA | | |
| 942380 | 4849 | 4868 | 331 | 350 | AAGCGACCCA | 43† | 1102 |
| | | | | | GTGCCAGTTC | | |
| 942386 | 4856 | 4875 | 338 | 357 | ATCCCAAAAG | 31† | 1103 |
| | | | | | CGACCCAGTG | | |
| 942392 | 4862 | 4881 | 344 | 363 | CAGGTAATCC | 39† | 1104 |
| | | | | | CAAAAGCGAC | | |
| 942397 | 4868 | 4887 | 350 | 369 | CCAGCGCAGG | 12† | 1105 |
| | | | | | TAATCCCAAA | | |
| 942402 | 4875 | 4894 | 357 | 376 | TCTGCACCCA | 22† | 34 |
| | | | | | GCGCAGGTAA | | |
| 942406 | 5561 | 5580 | 463 | 482 | TCCGATTTGT | 81 | 1106 |
| | | | | | AGGCCTTCAA | | |
| 942411 | 5567 | 5586 | 469 | 488 | TCCAGTTCCG | 95 | 1107 |
| | | | | | ATTTGTAGGC | | |
| 942417 | 5574 | 5593 | 476 | 495 | TTGTTCCTCC | 79 | 1108 |
| | | | | | AGTTCCGATT | | |
| 942423 | 5617 | 5636 | 519 | 538 | CCTTGGACAG | 59 | 1109 |
| | | | | | CCGTGCCCGC | | |
| 942429 | 5661 | 5680 | 563 | 582 | GTCCTCCATG | 87 | 1110 |
| | | | | | TCCGCGCCCA | | |
| 942435 | 5685 | 5704 | 587 | 606 | GTACTGCACC | 100 | 1111 |
| | | | | | AGGCGGCCGC | | |
| 942441 | 5691 | 5710 | 593 | 612 | GCCGCGGTAC | 79 | 46 |
| | | | | | TGCACCAGGC | | |
| 942447 | 5716 | 5735 | 618 | 637 | TCTGGCCGAG | 130 | 1112 |
| | | | | | CATGGCCTGC | | |
| 942453 | 5724 | 5743 | 626 | 645 | CTCGGTGCTC | 72 | 1113 |
| | | | | | TGGCCGAGCA | | |
| 942459 | 5746 | 5765 | 648 | 667 | AGGCGAGGCG | 81 | 1114 |
| | | | | | CACCCGCAGC | | |
| 942465 | 5760 | 5779 | 662 | 681 | CTTGCGCAGG | 86 | 1115 |
| | | | | | TGGGAGGCGA | | |
| 942471 | 5771 | 5790 | 673 | 692 | CGCTTACGCA | 87 | 1116 |
| | | | | | GCTTGCGCAG | | |
| 942477 | 5777 | 5796 | 679 | 698 | AGGAGCCGCT | 95 | 1117 |
| | | | | | TACGCAGCTT | | |
| 942483 | 5783 | 5802 | 685 | 704 | TCGCGGAGGA | 72 | 1118 |
| | | | | | GCCGCTTACG | | |
| 942489 | 5790 | 5809 | 692 | 711 | ATCGGCATCG | 118 | 1119 |
| | | | | | CGGAGGAGCC | | |
| 942495 | 5796 | 5815 | 698 | 717 | CAGGTCATCG | 76 | 1120 |
| | | | | | GCATCGCGGA | | |
| 942500 | 5825 | 5844 | 727 | 746 | CCGGCCTGGT | 97 | 52 |
| | | | | | ACACTGCCAG | | |
| 942506 | 5832 | 5851 | 734 | 753 | GCGGGCCCCG | 87 | 54 |
| | | | | | GCCTGGTACA | | |
| 942512 | 5901 | 5920 | 803 | 822 | CACGCGGCCC | 54 | 1121 |
| | | | | | TGTTCCACCA | | |
| 942518 | 5907 | 5926 | 809 | 828 | GGCCCGCACG | 87 | 1122 |
| | | | | | CGGCCCTGTT | | |
| 942524 | 5914 | 5933 | 816 | 835 | CAGTGGCGGC | 81 | 1123 |
| | | | | | CCGCACGCGG | | |
| 942530 | 5920 | 5939 | 822 | 841 | AGCCCACAGT | 122 | 1124 |
| | | | | | GGCGGCCCGC | | |
| 942536 | 5947 | 5966 | 849 | 868 | GCTCCTGTAG | 83 | 1125 |
| | | | | | CGGCTGGCCG | | |
| 942542 | 5955 | 5974 | 857 | 876 | CTGGGCCCGC | 65 | 1126 |
| | | | | | TCCTGTAGCG | | |
| 942548 | 6009 | 6028 | 911 | 930 | GCGGGTCCGG | 73 | 60 |
| | | | | | CTGCCCATCT | | |
| 942554 | 6015 | 6034 | 917 | 936 | GCGGTCGCGG | 83 | 1127 |
| | | | | | GTCCGGCTGC | | |
| 942560 | 6021 | 6040 | 923 | 942 | GTCCAGGCGG | 69 | 1128 |
| | | | | | TCGCGGGTCC | | |
| 942566 | 6062 | 6081 | 964 | 983 | TCCAGCTTGG | 68 | 61 |
| | | | | | CGCGCACCTC | | |
| 942572 | 6124 | 6143 | 1026 | 1045 | ACCAGCTCTT | 82 | 1129 |
| | | | | | GAGGCGGGCC | | |
| 942578 | 6130 | 6149 | 1032 | 1051 | GCTCGAACCA | 97 | 1130 |
| | | | | | GCTCTTGAGG | | |
| 942584 | 6233 | 6252 | 1135 | 1154 | GTTCAGTGAT | 71 | 1131 |
| | | | | | TGTCGCTGGG | | |
| 942588 | 6256 | 6275 | 1158 | 1177 | GTCGCATGGC | 9 | 1132 |
| | | | | | TGCAGGCTTC | | |
| 942593 | 6347 | 6366 | 1249 | 1268 | AACTAGGGTC | 52 | 75 |
| | | | | | CACCCCAGGA | | |
| 942599 | 2832 | 2851 | 84 | 103 | CGCTTCTCAC | 80 | 1133 |
| | | | | | CGGCTCCTGG | | |
| 942605 | 2839 | 2858 | 91 | 110 | CCGACTGCGC | 103 | 1134 |
| | | | | | TTCTCACCGG | | |
| 942611 | 2845 | 2864 | 97 | 116 | GTGCCCCCGA | 86 | 1135 |
| | | | | | CTGCGCTTCT | | |
| 942617 | 2853 | 2872 | 105 | 124 | TCATCCCCGT | 52 | 1136 |
| | | | | | GCCCCCGACT | | |
| 942623 | 3447 | 3466 | N/A | N/A | TTACCAAGCC | 96 | 1137 |
| | | | | | GCCCCCAACC | | |
| 942629 | 3453 | 3472 | N/A | N/A | GCACATTTAC | 65 | 1138 |
| | | | | | CAAGCCGCCC | | |
| 942635 | 3491 | 3510 | N/A | N/A | CCAAGCCTTG | 76 | 1139 |
| | | | | | TTGCATTATC | | |
| 942641 | 2923 | 2942 | N/A | N/A | GTAGCTCTCC | 117 | 1140 |
| | | | | | TGAGACTACC | | |
| 942647 | 2931 | 2950 | N/A | N/A | GACCCCGAGT | 98 | 1141 |
| | | | | | AGCTCTCCTG | | |
| 942653 | 2937 | 2956 | N/A | N/A | AAGCCCGACC | 75 | 1142 |
| | | | | | CCGAGTAGCT | | |
| 942659 | 3065 | 3084 | N/A | N/A | TATGGCTTAC | 96 | 1143 |
| | | | | | ATCCCAGTCC | | |
| 942665 | 3078 | 3097 | N/A | N/A | CGTGGAGTCC | 66 | 1144 |
| | | | | | TGCTATGGCT | | |
| 942671 | 3170 | 3189 | N/A | N/A | GCTACCGTGT | 73 | 1145 |
| | | | | | CGCTGCCCCT | | |
| 942677 | 3176 | 3195 | N/A | N/A | CGGCTAGCTA | 99 | 1146 |
| | | | | | CCGTGTCGCT | | |
| 942683 | 3187 | 3206 | N/A | N/A | TCTCCAATCG | 108 | 1147 |
| | | | | | ACGGCTAGCT | | |
| 942689 | 3231 | 3250 | N/A | N/A | CGCCGTGTTC | 68 | 1148 |
| | | | | | CATTTATGAG | | |
| 942695 | 3305 | 3324 | N/A | N/A | CCGGTTCCAT | 79 | 1149 |
| | | | | | CTCAGTCCCA | | |
| 942701 | 3311 | 3330 | N/A | N/A | CCACCGCCGG | 81 | 1150 |
| | | | | | TTCCATCTCA | | |
| 942707 | 3383 | 3402 | N/A | N/A | CCCCAGGTCG | 78 | 1151 |
| | | | | | GCCTCCATAG | | |
| 942713 | 3556 | 3575 | N/A | N/A | CCGCCAGTGA | 77 | 1152 |
| | | | | | GGACTCCTCC | | |
| 942719 | 3567 | 3586 | N/A | N/A | CTGTCAATCA | 88 | 1153 |
| | | | | | ACCGCCAGTG | | |
| 942725 | 3785 | 3804 | N/A | N/A | ATCGCTGTTC | 92 | 1154 |
| | | | | | AGAGCCAGGA | | |
| 942731 | 4219 | 4238 | N/A | N/A | GCCCCGTGTC | 73 | 1155 |
| | | | | | TGGTATTCAC | | |
| 942737 | 4233 | 4252 | N/A | N/A | TAAAGATCAC | 82 | 1156 |
| | | | | | AGCTGCCCCG | | |
| 942743 | 4612 | 4631 | N/A | N/A | GTCGGTTTAA | 73 | 1157 |
| | | | | | TCACTTGGAA | | |
| 942749 | 4699 | 4718 | N/A | N/A | CCCGTCCAGG | 74 | 1158 |
| | | | | | CATCTAGTAC | | |
| 942755 | 4706 | 4725 | N/A | N/A | TTCTGACCCC | 108 | 1159 |
| | | | | | GTCCAGGCAT | | |
| 942761 | 4733 | 4752 | N/A | N/A | GAACAAGTTC | 98 | 1160 |
| | | | | | AAGGTGGGTC | | |
| 942767 | 4979 | 4998 | N/A | N/A | ATAGCCGCCC | 75† | 1161 |
| | | | | | ACCAGGAGGG | | |
| 942773 | 4985 | 5004 | N/A | N/A | GGAGGTATAG | 87† | 1162 |
| | | | | | CCGCCCACCA | | |
| 942779 | 5152 | 5171 | N/A | N/A | CGAGTGTGAG | 87† | 1163 |
| | | | | | AGACTGAGTC | | |
| 942785 | 5518 | 5537 | N/A | N/A | GCGCCCTGCG | 75† | 1164 |
| | | | | | GCCGAGAGGG | | |

TABLE 21
Reduction of APOE RNA by 5-10-5 MOE gapmers
with mixed PO/PS internucleoside linkages at
a concentration of 4000 nM in Hep3B cells
plated at 20,000 cells per well

| | SEQ | SEQ | SEQ | SEQ | | | |
|---|---|---|---|---|---|---|---|
| | ID | ID | ID | ID | | | |
| | No: | No: | No: | No: | | | |
| Com- | 1 | 1 | 2 | 2 | | APOE | SEQ |
| pound | Start | Stop | Start | Stop | Sequence | (% | ID |
| Number | Site | Site | Site | Site | (5′ to 3′) | UTC) | NO |
| 942584 | 6233 | 6252 | 1135 | 1154 | GTTCAGTGAT | 43 | 1131 |
| | | | | | TGTCGCTGGG | | |
| 942586 | 6253 | 6272 | 1155 | 1174 | GCATGGCTGC | 14 | 919 |
| | | | | | AGGCTTCGGC | | |
| 942597 | 6353 | 6372 | 1255 | 1274 | TTATTAAACT | 48 | 76 |
| | | | | | AGGGTCCACC | | |
| 1517142 | 3368 | 3387 | N/A | N/A | CATAGAAAAT | 76 | 1165 |
| | | | | | TCCATCTTCC | | |
| 1517148 | 3219 | 3238 | N/A | N/A | TTTATGAGCT | 60 | 1166 |
| | | | | | AATTCAGTCC | | |
| 1517167 | 4819 | 4838 | 301 | 320 | CCGCTCTGCC | 63 | 1167 |
| | | | | | ACTCGGTCTG | | |
| 1517173 | 4210 | 4229 | N/A | N/A | CTGGTATTCA | 82 | 1168 |
| | | | | | CTATCTGCCT | | |
| 1517183 | 3446 | 3465 | N/A | N/A | TACCAAGCCG | 62 | 1169 |
| | | | | | CCCCCAACCC | | |
| 1517210 | 3005 | 3024 | N/A | N/A | CTCTGCTGCC | 89 | 1170 |
| | | | | | CAGCCCTTCC | | |
| 1517234 | 4782 | 4801 | 264 | 283 | CCGGCTCTGT | 59 | 1171 |
| | | | | | CTCCACCGCT | | |
| 1517246 | 3062 | 3081 | N/A | N/A | GGCTTACATC | 68 | 1172 |
| | | | | | CCAGTCCAGC | | |
| 1517253 | 5044 | 5063 | N/A | N/A | AGCAGAGACC | 76† | 1173 |
| | | | | | CAGGCCCCCC | | |
| 1517272 | 3850 | 3869 | N/A | N/A | AACAACAAAA | 81 | 1174 |
| | | | | | CAACTTCTAA | | |
| 1517280 | 6173 | 6192 | 1075 | 1094 | TCCACCAGCC | 82 | 1175 |
| | | | | | CGGCCCACTG | | |
| 1517287 | 3629 | 3648 | 203 | 222 | CAACGCAGCC | 62 | 1176 |
| | | | | | CACAGAACCT | | |
| 1517293 | 3398 | 3417 | N/A | N/A | CTCTTATCTC | 67 | 1177 |
| | | | | | CCCATCCCCA | | |
| 1517308 | 3295 | 3314 | N/A | N/A | CTCAGTCCCA | 62 | 1178 |
| | | | | | GTCTCGCATT | | |
| 1517316 | 4613 | 4632 | N/A | N/A | AGTCGGTTTA | 73 | 1179 |
| | | | | | ATCACTTGGA | | |
| 1517317 | 3434 | 3453 | N/A | N/A | CCCAACCCAT | 79 | 1180 |
| | | | | | TCCCTATTTA | | |
| 1517318 | 3254 | 3273 | N/A | N/A | TAAGCTCCAA | 68 | 1181 |
| | | | | | CCTCACAGTT | | |
| 1517322 | 4594 | 4613 | N/A | N/A | AAAGCATTAT | 92 | 1182 |
| | | | | | GTATTTATAA | | |
| 1517333 | 6213 | 6232 | 1115 | 1134 | CACAGGGGCG | 88 | 1183 |
| | | | | | GCGCTGGTGC | | |
| 1517341 | 4766 | 4785 | 248 | 267 | CGCTTGCTCC | 106 | 1184 |
| | | | | | ACCTTGGCCT | | |
| 1517343 | 3466 | 3485 | N/A | N/A | CAGCCTAATC | 79 | 1185 |
| | | | | | CCAGCACATT | | |
| 1517345 | 4887 | 4906 | 369 | 388 | GCTCAGACAG | 38† | 1186 |
| | | | | | TGTCTGCACC | | |
| 1517347 | 3527 | 3546 | N/A | N/A | CCCGGCCCCA | 110 | 1187 |
| | | | | | ACCCGGCCTC | | |
| 1517356 | 3266 | 3285 | N/A | N/A | CCCTTCACAT | 84 | 1188 |
| | | | | | TCTAAGCTCC | | |
| 1517365 | 3617 | 3636 | 191 | 210 | CAGAACCTTC | 52 | 1189 |
| | | | | | ATCTTCCTGC | | |
| 1517378 | 3410 | 3429 | N/A | N/A | CCTCCTGGTC | 68 | 1190 |
| | | | | | TTCTCTTATC | | |
| 1517392 | 3341 | 3360 | N/A | N/A | GGGTTCAAAT | 72 | 1191 |
| | | | | | TCCATCCCCC | | |
| 1517396 | 6333 | 6352 | 1235 | 1254 | CCAGGAGGAC | 77 | 1192 |
| | | | | | GGCTGGGGCG | | |
| 1517427 | 6363 | 6382 | 1265 | 1284 | TGGTGAATCT | 18 | 1193 |
| | | | | | TTATTAAACT | | |
| 1517441 | 5009 | 5028 | N/A | N/A | GGGCAGAATG | 85† | 1194 |
| | | | | | AAACCTGGAC | | |
| 1517447 | 3513 | 3532 | N/A | N/A | GGCCTCACCC | 84 | 1195 |
| | | | | | CAGGTTAGCC | | |
| 1517456 | 3319 | 3338 | N/A | N/A | CCCCCTCCCC | 67 | 1196 |
| | | | | | ACCGCCGGTT | | |
| 1517459 | 3424 | 3443 | N/A | N/A | TCCCTATTTA | 90 | 1197 |
| | | | | | ACTCCCTCCT | | |
| 1517464 | 3667 | 3686 | N/A | N/A | GCAAGCCCCG | 71 | 1198 |
| | | | | | CCCCCATACC | | |
| 1517483 | 3105 | 3124 | N/A | N/A | GGTGCTCGAT | 82 | 1199 |
| | | | | | AAATGATAGT | | |
| 1517492 | 4540 | 4559 | N/A | N/A | AGCGGCCTGA | 94 | 1200 |
| | | | | | ACATGGTTCA | | |
| 1517493 | 3768 | 3787 | N/A | N/A | GGAAGCAGCA | 65 | 1201 |
| | | | | | CAGAAGCCTC | | |
| 1517510 | 3571 | 3590 | N/A | N/A | GAAACTGTCA | 80 | 1202 |
| | | | | | ATCAACCGCC | | |
| 1517512 | 2881 | 2900 | 133 | 152 | TCCCAGCTCT | 84 | 1203 |
| | | | | | TTCTAGAGGC | | |
| 1517531 | 4707 | 4726 | N/A | N/A | CTTCTGACCC | 81 | 1204 |
| | | | | | CGTCCAGGCA | | |
| 1517535 | 6263 | 6282 | 1165 | 1184 | GCGTGGGGTC | 23 | 1205 |
| | | | | | GCATGGCTGC | | |
| 1517548 | 3206 | 3225 | N/A | N/A | TCAGTCCTCA | 81 | 1206 |
| | | | | | TTTTAAAGTT | | |
| 1517555 | 6303 | 6322 | 1205 | 1224 | CTCCCGCTGC | 33 | 1207 |
| | | | | | AGGCTGCGCG | | |
| 1517556 | 3551 | 3570 | N/A | N/A | AGTGAGGACT | 76 | 1208 |
| | | | | | CCTCCCACCC | | |
| 1517558 | 6153 | 6172 | 1055 | 1074 | GCGCTGCATG | 55 | 66 |
| | | | | | TCTTCCACCA | | |
| 1517560 | 6273 | 6292 | 1175 | 1194 | GCACGGGGTG | 59 | 1209 |
| | | | | | GCGTGGGGTC | | |
| 1517561 | 3050 | 3069 | N/A | N/A | AGTCCAGCTG | 69 | 1210 |
| | | | | | CTCTCCCCAC | | |
| 1517581 | 5056 | 5075 | N/A | N/A | GAAGCTAGAA | 82† | 1211 |
| | | | | | CCAGCAGAGA | | |
| 1517601 | 2864 | 2883 | 116 | 135 | GGCCCCTGAG | 82 | 1212 |
| | | | | | CTCATCCCCG | | |
| 1517603 | 2988 | 3007 | N/A | N/A | TCCCAGGTCC | 91 | 1213 |
| | | | | | AGTCCCCTGC | | |
| 1517612 | 3193 | 3212 | N/A | N/A | TAAAGTTCTC | 65 | 1214 |
| | | | | | CAATCGACGG | | |
| 1517617 | 6133 | 6152 | 1035 | 1054 | GGGGCTCGAA | 81 | 1215 |
| | | | | | CCAGCTCTTG | | |
| 1517646 | 2962 | 2981 | N/A | N/A | CCTCACCCCC | 117 | 1216 |
| | | | | | GCTCCTCCTC | | |
| 1517648 | 6243 | 6262 | 1145 | 1164 | AGGCTTCGGC | 63 | 1217 |
| | | | | | GTTCAGTGAT | | |
| 1517660 | 3380 | 3399 | N/A | N/A | CAGGTCGGCC | 83 | 1218 |
| | | | | | TCCATAGAAA | | |
| 1517677 | 3283 | 3302 | N/A | N/A | CTCGCATTCC | 52 | 1219 |
| | | | | | TCATTCTCCC | | |
| 1517688 | 6193 | 6212 | 1095 | 1114 | CCACGGCAGC | 64 | 1220 |
| | | | | | CTGCACCTTC | | |
| 1517714 | 4194 | 4213 | N/A | N/A | GCCTGCAATG | 78 | 1221 |
| | | | | | CATTAGAAAC | | |
| 1517743 | 4242 | 4261 | N/A | N/A | GATGGAGAAT | 81 | 1222 |
| | | | | | AAAGATCACA | | |
| 1517751 | 3494 | 3513 | N/A | N/A | CTTCCAAGCC | 85 | 1223 |
| | | | | | TTGTTGCATT | | |
| 1517755 | 6313 | 6332 | 1215 | 1234 | GGGACAGGGT | 46 | 1224 |
| | | | | | CTCCCGCTGC | | |
| 1517766 | 6343 | 6362 | 1245 | 1264 | AGGGTCCACC | 87 | 74 |
| | | | | | CCAGGAGGAC | | |
| 1517773 | 3840 | 3859 | N/A | N/A | CAACTTCTAA | 91 | 1225 |
| | | | | | CTCCTATCTC | | |
| 1517790 | 6283 | 6302 | 1185 | 1204 | GAGGCAGGAG | 86 | 1226 |
| | | | | | GCACGGGGTG | | |
| 1517796 | 3658 | 3677 | N/A | N/A | GCCCCCATAC | 91 | 1227 |
| | | | | | CTGCCAGGAA | | |
| 1517814 | 4909 | 4928 | 391 | 410 | CTGAGCAGCT | 44† | 1228 |
| | | | | | CCTCCTGCAC | | |
| 1517817 | 6293 | 6312 | 1195 | 1214 | AGGCTGCGCG | 45 | 1229 |
| | | | | | GAGGCAGGAG | | |
| 1517834 | 2972 | 2991 | N/A | N/A | CTGCTGCTTG | 76 | 1230 |
| | | | | | CCTCACCCCC | | |
| 1517849 | 6374 | 6393 | 1276 | 1295 | TGCGTGAAAC | 19 | 1231 |
| | | | | | TTGGTGAATC | | |
| 1517853 | 6364 | 6383 | 1266 | 1285 | TTGGTGAATC | 22 | 1232 |
| | | | | | TTTATTAAAC | | |
| 1517860 | 2948 | 2967 | N/A | N/A | CTCCTCTCCC | 79 | 1233 |
| | | | | | CAAGCCCGAC | | |
| 1517894 | 6323 | 6342 | 1225 | 1244 | GGCTGGGGCG | 116 | 1234 |
| | | | | | GGGACAGGGT | | |
| 1517897 | 2919 | 2938 | N/A | N/A | CTCTCCTGAG | 63 | 1235 |
| | | | | | ACTACCTGGA | | |
| 1517902 | 4184 | 4203 | N/A | N/A | CATTAGAAAC | 104 | 1236 |
| | | | | | CTCTAACTCC | | |
| 1517905 | 3477 | 3496 | N/A | N/A | ATTATCTGCA | 75 | 1237 |
| | | | | | ACAGCCTAAT | | |

TABLE 22
Reduction of APOE RNA by 5-10-5 MOE gapmers
with mixed PO/PS internucleoside linkages at
a concentration of 4000 nM in Hep3B cells
plated at 20,000 cells per well

| | SEQ | SEQ | SEQ | SEQ | | | |
|---|---|---|---|---|---|---|---|
| | ID | ID | ID | ID | | | |
| | No: | No: | No: | No: | | | |
| Com- | 1 | 1 | 2 | 2 | | APOE | SEQ |
| pound | Start | Stop | Start | Stop | Sequence | (% | ID |
| Number | Site | Site | Site | Site | (5′ to 3′) | UTC) | NO |
| 942582 | 6231 | 6250 | 1133 | 1152 | TCAGTGATTG | 61 | 989 |
| | | | | | TCGCTGGGCA | | |
| 942585 | 6252 | 6271 | 1154 | 1173 | CATGGCTGCA | 36 | 847 |
| | | | | | GGCTTCGGCG | | |
| 942590 | 6302 | 6321 | 1204 | 1223 | TCCCGCTGCA | 83 | 920 |
| | | | | | GGCTGCGCGG | | |
| 1517150 | 3409 | 3428 | N/A | N/A | CTCCTGGTCT | 71 | 1238 |
| | | | | | TCTCTTATCT | | |
| 1517180 | 6312 | 6331 | 1214 | 1233 | GGACAGGGTC | 26 | 1239 |
| | | | | | TCCCGCTGCA | | |
| 1517187 | 4193 | 4212 | N/A | N/A | CCTGCAATGC | 78 | 1240 |
| | | | | | ATTAGAAACC | | |
| 1517192 | 4208 | 4227 | N/A | N/A | GGTATTCACT | 77 | 1241 |
| | | | | | ATCTGCCTGC | | |
| 1517199 | 3253 | 3272 | N/A | N/A | AAGCTCCAAC | 82 | 1242 |
| | | | | | CTCACAGTTA | | |
| 1517200 | 3340 | 3359 | N/A | N/A | GGTTCAAATT | 75 | 1243 |
| | | | | | CCATCCCCCC | | |
| 1517201 | 3004 | 3023 | N/A | N/A | TCTGCTGCCC | 78 | 1244 |
| | | | | | AGCCCTTCCC | | |
| 1517227 | 3205 | 3224 | N/A | N/A | CAGTCCTCAT | 74 | 1245 |
| | | | | | TTTAAAGTTC | | |
| 1517232 | 5008 | 5027 | N/A | N/A | GGCAGAATGA | 72† | 1246 |
| | | | | | AACCTGGACC | | |
| 1517235 | 4697 | 4716 | N/A | N/A | CGTCCAGGCA | 67 | 1247 |
| | | | | | TCTAGTACCT | | |
| 1517236 | 3422 | 3441 | N/A | N/A | CCTATTTAAC | 74 | 1248 |
| | | | | | TCCCTCCTGG | | |
| 1517245 | 3378 | 3397 | N/A | N/A | GGTCGGCCTC | 50 | 1249 |
| | | | | | CATAGAAAAT | | |
| 1517252 | 3190 | 3209 | N/A | N/A | AGTTCTCCAA | 91 | 1250 |
| | | | | | TCGACGGCTA | | |
| 1517289 | 2961 | 2980 | N/A | N/A | CTCACCCCCG | 103 | 1251 |
| | | | | | CTCCTCCTCT | | |
| 1517290 | 6151 | 6170 | 1053 | 1072 | GCTGCATGTC | 71 | 1252 |
| | | | | | TTCCACCAGG | | |
| 1517294 | 6272 | 6291 | 1174 | 1193 | CACGGGGTGG | 84 | 1253 |
| | | | | | CGTGGGGTCG | | |
| 1517328 | 3061 | 3080 | N/A | N/A | GCTTACATCC | 72 | 1254 |
| | | | | | CAGTCCAGCT | | |
| 1517370 | N/A | N/A | 232 | 251 | GCCTGGCATC | 88 | 1255 |
| | | | | | CTGCCAGGAA | | |
| 1517371 | 2971 | 2990 | N/A | N/A | TGCTGCTTGC | 86 | 1256 |
| | | | | | CTCACCCCCG | | |
| 1517412 | 4240 | 4259 | N/A | N/A | TGGAGAATAA | 71 | 1257 |
| | | | | | AGATCACAGC | | |
| 1517426 | 4183 | 4202 | N/A | N/A | ATTAGAAACC | 90 | 1258 |
| | | | | | TCTAACTCCC | | |
| 1517427 | 6363 | 6382 | 1265 | 1284 | TGGTGAATCT | 14 | 1193 |
| | | | | | TTATTAAACT | | |
| 1517428 | 4765 | 4784 | 247 | 266 | GCTTGCTCCA | 164 | 1259 |
| | | | | | CCTTGGCCTG | | |
| 1517430 | 3849 | 3868 | N/A | N/A | ACAACAAAAC | 76 | 1260 |
| | | | | | AACTTCTAAC | | |
| 1517438 | 3616 | 3635 | 190 | 209 | AGAACCTTCA | 85 | 1261 |
| | | | | | TCTTCCTGCC | | |
| 1517450 | 3282 | 3301 | N/A | N/A | TCGCATTCCT | 69 | 1262 |
| | | | | | CATTCTCCCT | | |
| 1517460 | 3627 | 3646 | 201 | 220 | ACGCAGCCCA | 61 | 1263 |
| | | | | | CAGAACCTTC | | |
| 1517461 | 3666 | 3685 | N/A | N/A | CAAGCCCCGC | 66 | 1264 |
| | | | | | CCCCATACCT | | |
| 1517477 | 6262 | 6281 | 1164 | 1183 | CGTGGGGTCG | 32 | 1265 |
| | | | | | CATGGCTGCA | | |
| 1517485 | 3218 | 3237 | N/A | N/A | TTATGAGCTA | 63 | 1266 |
| | | | | | ATTCAGTCCT | | |
| 1517487 | 3839 | 3858 | N/A | N/A | AACTTCTAAC | 85 | 1267 |
| | | | | | TCCTATCTCA | | |
| 1517494 | 5042 | 5061 | N/A | N/A | CAGAGACCCA | 82† | 1268 |
| | | | | | GGCCCCCCAA | | |
| 1517498 | 6292 | 6311 | 1194 | 1213 | GGCTGCGCGG | 39 | 1269 |
| | | | | | AGGCAGGAGG | | |
| 1517504 | 4593 | 4612 | N/A | N/A | AAGCATTATG | 84 | 1270 |
| | | | | | TATTTATAAA | | |
| 1517506 | 6282 | 6301 | 1184 | 1203 | AGGCAGGAGG | 81 | 1271 |
| | | | | | CACGGGGTGG | | |
| 1517522 | 4611 | 4630 | N/A | N/A | TCGGTTTAAT | 108 | 1272 |
| | | | | | CACTTGGAAA | | |
| 1517542 | 3476 | 3495 | N/A | N/A | TTATCTGCAA | 76 | 1273 |
| | | | | | CAGCCTAATC | | |
| 1517554 | 5055 | 5074 | N/A | N/A | AAGCTAGAAC | 93† | 1274 |
| | | | | | CAGCAGAGAC | | |
| 1517557 | 4539 | 4558 | N/A | N/A | GCGGCCTGAA | 79 | 1275 |
| | | | | | CATGGTTCAC | | |
| 1517559 | 6342 | 6361 | 1244 | 1263 | GGGTCCACCC | 69 | 1276 |
| | | | | | CAGGAGGACG | | |
| 1517569 | 3294 | 3313 | N/A | N/A | TCAGTCCCAG | 88 | 1277 |
| | | | | | TCTCGCATTC | | |
| 1517583 | 2916 | 2935 | N/A | N/A | TCCTGAGACT | 86 | 1278 |
| | | | | | ACCTGGAGGC | | |
| 1517586 | 3526 | 3545 | N/A | N/A | CCGGCCCCAA | 100 | 1279 |
| | | | | | CCCGGCCTCA | | |
| 1517600 | 3512 | 3531 | N/A | N/A | GCCTCACCCC | 95 | 1280 |
| | | | | | AGGTTAGCCT | | |
| 1517605 | 3465 | 3484 | N/A | N/A | AGCCTAATCC | 81 | 1281 |
| | | | | | CAGCACATTT | | |
| 1517606 | 3570 | 3589 | N/A | N/A | AAACTGTCAA | 101 | 1282 |
| | | | | | TCAACCGCCA | | |
| 1517614 | 3264 | 3283 | N/A | N/A | CTTCACATTC | 74 | 1283 |
| | | | | | TAAGCTCCAA | | |
| 1517620 | 5102 | 5121 | N/A | N/A | GAGAGAATTC | 84† | 1284 |
| | | | | | CAGAGAGCTA | | |
| 1517626 | 6211 | 6230 | 1113 | 1132 | CAGGGGCGGC | 88 | 1285 |
| | | | | | GCTGGTGCCC | | |
| 1517631 | 6322 | 6341 | 1224 | 1243 | GCTGGGGCGG | 89 | 1286 |
| | | | | | GGACAGGGTC | | |
| 1517679 | 3367 | 3386 | N/A | N/A | ATAGAAAATT | 78 | 1287 |
| | | | | | CCATCTTCCT | | |
| 1517697 | 6352 | 6371 | 1254 | 1273 | TATTAAACTA | 49 | 1288 |
| | | | | | GGGTCCACCC | | |
| 1517698 | 6191 | 6210 | 1093 | 1112 | ACGGCAGCCT | 70 | 1289 |
| | | | | | GCACCTTCTC | | |
| 1517700 | 2947 | 2966 | N/A | N/A | TCCTCTCCCC | 76 | 1290 |
| | | | | | AAGCCCGACC | | |
| 1517710 | 3048 | 3067 | N/A | N/A | TCCAGCTGCT | 75 | 1291 |
| | | | | | CTCCCCACCC | | |
| 1517711 | 4908 | 4927 | 390 | 409 | TGAGCAGCTC | 41† | 1292 |
| | | | | | CTCCTGCACC | | |
| 1517716 | 2863 | 2882 | 115 | 134 | GCCCCTGAGC | 93 | 1293 |
| | | | | | TCATCCCCGT | | |
| 1517717 | 3550 | 3569 | N/A | N/A | GTGAGGACTC | 75 | 1294 |
| | | | | | CTCCCACCCC | | |
| 1517728 | 3493 | 3512 | N/A | N/A | TTCCAAGCCT | 78 | 1295 |
| | | | | | TGTTGCATTA | | |
| 1517738 | 3433 | 3452 | N/A | N/A | CCAACCCATT | 87 | 1296 |
| | | | | | CCCTATTTAA | | |
| 1517752 | 3103 | 3122 | N/A | N/A | TGCTCGATAA | 73 | 1297 |
| | | | | | ATGATAGTGA | | |
| 1517754 | 4781 | 4800 | 263 | 282 | CGGCTCTGTC | 61 | 1298 |
| | | | | | TCCACCGCTT | | |
| 1517756 | 2987 | 3006 | N/A | N/A | CCCAGGTCCA | 78 | 1299 |
| | | | | | GTCCCCTGCT | | |
| 1517770 | 6362 | 6381 | 1264 | 1283 | GGTGAATCTT | 8 | 1300 |
| | | | | | TATTAAACTA | | |
| 1517785 | 3318 | 3337 | N/A | N/A | CCCCTCCCCA | 80 | 1301 |
| | | | | | CCGCCGGTTC | | |
| 1517801 | 6171 | 6190 | 1073 | 1092 | CACCAGCCCG | 89 | 1302 |
| | | | | | GCCCACTGGC | | |
| 1517807 | 4881 | 4900 | 363 | 382 | ACAGTGTCTG | 19† | 1303 |
| | | | | | CACCCAGCGC | | |
| 1517831 | 3767 | 3786 | N/A | N/A | GAAGCAGCAC | 90 | 1304 |
| | | | | | AGAAGCCTCA | | |
| 1517837 | 6373 | 6392 | 1275 | 1294 | GCGTGAAACT | 25 | 1305 |
| | | | | | TGGTGAATCT | | |
| 1517856 | 3397 | 3416 | N/A | N/A | TCTTATCTCC | 69 | 1306 |
| | | | | | CCATCCCCAG | | |
| 1517865 | 4818 | 4837 | 300 | 319 | CGCTCTGCCA | 107 | 1307 |
| | | | | | CTCGGTCTGC | | |
| 1517866 | 3445 | 3464 | N/A | N/A | ACCAAGCCGC | 77 | 1308 |
| | | | | | CCCCAACCCA | | |
| 1517869 | 6332 | 6351 | 1234 | 1253 | CAGGAGGACG | 90 | 1309 |
| | | | | | GCTGGGGCGG | | |
| 1517870 | 2880 | 2899 | 132 | 151 | CCCAGCTCTT | 77 | 1310 |
| | | | | | TCTAGAGGCC | | |
| 1517882 | 6242 | 6261 | 1144 | 1163 | GGCTTCGGCG | 56 | 1311 |
| | | | | | TTCAGTGATT | | |

TABLE 23
Reduction of APOE RNA by 5-10-5 MOE gapmers
with mixed PO/PS internucleoside linkages
at a concentration of 4000 nM in Hep3B
cells plated at 20,000 cells per well

| | SEQ | SEQ | SEQ | SEQ | | | |
|---|---|---|---|---|---|---|---|
| | ID | ID | ID | ID | | | |
| | No: | No: | No: | No: | | | |
| Com- | 1 | 1 | 2 | 2 | | APOE | SEQ |
| pound | Start | Stop | Start | Stop | Sequence | (% | ID |
| Number | Site | Site | Site | Site | (5′ to 3′) | UTC) | NO |
| 942589 | 6301 | 6320 | 1203 | 1222 | CCCGCTGCAG | 51 | 848 |
| | | | | | GCTGCGCGGA | | |
| 942592 | 6341 | 6360 | 1243 | 1262 | GGTCCACCCC | 74 | 1062 |
| | | | | | AGGAGGACGG | | |
| 942596 | 6351 | 6370 | 1253 | 1272 | ATTAAACTAG | 54 | 921 |
| | | | | | GGTCCACCCC | | |
| 942598 | 6372 | 6391 | 1274 | 1293 | CGTGAAACTT | 30 | 1063 |
| | | | | | GGTGAATCTT | | |
| 1517149 | 6241 | 6260 | 1143 | 1162 | GCTTCGGCGT | 70 | 1312 |
| | | | | | TCAGTGATTG | | |
| 1517168 | 3444 | 3463 | N/A | N/A | CCAAGCCGCC | 87 | 1313 |
| | | | | | CCCAACCCAT | | |
| 1517169 | 3102 | 3121 | N/A | N/A | GCTCGATAAA | 91 | 1314 |
| | | | | | TGATAGTGAC | | |
| 1517170 | 6281 | 6300 | 1183 | 1202 | GGCAGGAGGC | 49 | 1315 |
| | | | | | ACGGGGTGGC | | |
| 1517178 | 3204 | 3223 | N/A | N/A | AGTCCTCATT | 78 | 1316 |
| | | | | | TTAAAGTTCT | | |
| 1517191 | 6251 | 6270 | 1153 | 1172 | ATGGCTGCAG | 49 | 1317 |
| | | | | | GCTTCGGCGT | | |
| 1517194 | 2985 | 3004 | N/A | N/A | CAGGTCCAGT | 89 | 1318 |
| | | | | | CCCCTGCTGC | | |
| 1517197 | 6149 | 6168 | 1051 | 1070 | TGCATGTCTT | 78 | 1319 |
| | | | | | CCACCAGGGG | | |
| 1517226 | 3281 | 3300 | N/A | N/A | CGCATTCCTC | 63 | 1320 |
| | | | | | ATTCTCCCTT | | |
| 1517229 | 5040 | 5059 | N/A | N/A | GAGACCCAGG | 98† | 1321 |
| | | | | | CCCCCCAAGA | | |
| 1517276 | 3408 | 3427 | N/A | N/A | TCCTGGTCTT | 84 | 1322 |
| | | | | | CTCTTATCTC | | |
| 1517291 | 3525 | 3544 | N/A | N/A | CGGCCCCAAC | 107 | 1323 |
| | | | | | CCGGCCTCAC | | |
| 1517304 | 4608 | 4627 | N/A | N/A | GTTTAATCAC | 77 | 1324 |
| | | | | | TTGGAAAGCA | | |
| 1517306 | 3549 | 3568 | N/A | N/A | TGAGGACTCC | 80 | 1325 |
| | | | | | TCCCACCCCC | | |
| 1517309 | 6331 | 6350 | 1233 | 1252 | AGGAGGACGG | 90 | 1326 |
| | | | | | CTGGGGCGGG | | |
| 1517311 | 4880 | 4899 | 362 | 381 | CAGTGTCTGC | 36† | 1327 |
| | | | | | ACCCAGCGCA | | |
| 1517336 | 3464 | 3483 | N/A | N/A | GCCTAATCCC | 86 | 1328 |
| | | | | | AGCACATTTA | | |
| 1517337 | 3047 | 3066 | N/A | N/A | CCAGCTGCTC | 74 | 1329 |
| | | | | | TCCCCACCCC | | |
| 1517379 | 3252 | 3271 | N/A | N/A | AGCTCCAACC | 73 | 1330 |
| | | | | | TCACAGTTAA | | |
| 1517388 | 6321 | 6340 | 1223 | 1242 | CTGGGGCGGG | 94 | 1331 |
| | | | | | GACAGGGTCT | | |
| 1517401 | 3366 | 3385 | N/A | N/A | TAGAAAATTC | 96 | 1332 |
| | | | | | CATCTTCCTC | | |
| 1517406 | 6169 | 6188 | 1071 | 1090 | CCAGCCCGGC | 79 | 1333 |
| | | | | | CCACTGGCGC | | |
| 1517427 | 6363 | 6382 | 1265 | 1284 | TGGTGAATCT | 25 | 1193 |
| | | | | | TTATTAAACT | | |
| 1517448 | 4192 | 4211 | N/A | N/A | CTGCAATGCA | 89 | 1334 |
| | | | | | TTAGAAACCT | | |
| 1517454 | 3420 | 3439 | N/A | N/A | TATTTAACTC | 91 | 1335 |
| | | | | | CCTCCTGGTC | | |
| 1517455 | 3003 | 3022 | N/A | N/A | CTGCTGCCCA | 74 | 1336 |
| | | | | | GCCCTTCCCA | | |
| 1517458 | 3838 | 3857 | N/A | N/A | ACTTCTAACT | 79 | 1337 |
| | | | | | CCTATCTCAA | | |
| 1517463 | 4665 | 4684 | N/A | N/A | AAGGTGCTCC | 92 | 1338 |
| | | | | | ACAAATGCTT | | |
| 1517472 | 3848 | 3867 | N/A | N/A | CAACAAAACA | 86 | 1339 |
| | | | | | ACTTCTAACT | | |
| 1517474 | 3487 | 3506 | N/A | N/A | GCCTTGTTGC | 96 | 1340 |
| | | | | | ATTATCTGCA | | |
| 1517486 | 4779 | 4798 | 261 | 280 | GCTCTGTCTC | 84 | 1341 |
| | | | | | CACCGCTTGC | | |
| 1517489 | 3263 | 3282 | N/A | N/A | TTCACATTCT | 70 | 1342 |
| | | | | | AAGCTCCAAC | | |
| 1517491 | 3291 | 3310 | N/A | N/A | GTCCCAGTCT | 71 | 1343 |
| | | | | | CGCATTCCTC | | |
| 1517495 | 4239 | 4258 | N/A | N/A | GGAGAATAAA | 63 | 1344 |
| | | | | | GATCACAGCT | | |
| 1517511 | 3339 | 3358 | N/A | N/A | GTTCAAATTC | 75 | 1345 |
| | | | | | CATCCCCCCA | | |
| 1517523 | 3626 | 3645 | 200 | 219 | CGCAGCCCAC | 80 | 1346 |
| | | | | | AGAACCTTCA | | |
| 1517528 | 4817 | 4836 | 299 | 318 | GCTCTGCCAC | 106 | 1347 |
| | | | | | TCGGTCTGCT | | |
| 1517538 | 2861 | 2880 | 113 | 132 | CCCTGAGCTC | 80 | 1348 |
| | | | | | ATCCCCGTGC | | |
| 1517546 | 4591 | 4610 | N/A | N/A | GCATTATGTA | 92 | 1349 |
| | | | | | TTTATAAACA | | |
| 1517566 | 3217 | 3236 | N/A | N/A | TATGAGCTAA | 87 | 1350 |
| | | | | | TTCAGTCCTC | | |
| 1517587 | 6189 | 6208 | 1091 | 1110 | GGCAGCCTGC | 67 | 1351 |
| | | | | | ACCTTCTCCA | | |
| 1517619 | 2960 | 2979 | N/A | N/A | TCACCCCCGC | 78 | 1352 |
| | | | | | TCCTCCTCTC | | |
| 1517628 | 3511 | 3530 | N/A | N/A | CCTCACCCCA | 92 | 1353 |
| | | | | | GGTTAGCCTT | | |
| 1517629 | 3317 | 3336 | N/A | N/A | CCCTCCCCAC | 99 | 1354 |
| | | | | | CGCCGGTTCC | | |
| 1517632 | 6261 | 6280 | 1163 | 1182 | GTGGGGTCGC | 41 | 1355 |
| | | | | | ATGGCTGCAG | | |
| 1517636 | 6291 | 6310 | 1193 | 1212 | GCTGCGCGGA | 32 | 1356 |
| | | | | | GGCAGGAGGC | | |
| 1517653 | 2946 | 2965 | N/A | N/A | CCTCTCCCCA | 91 | 1357 |
| | | | | | AGCCCGACCC | | |
| 1517657 | 4182 | 4201 | N/A | N/A | TTAGAAACCT | 83 | 1358 |
| | | | | | CTAACTCCCA | | |
| 1517672 | 5007 | 5026 | N/A | N/A | GCAGAATGAA | 73† | 1359 |
| | | | | | ACCTGGACCT | | |
| 1517673 | 3396 | 3415 | N/A | N/A | CTTATCTCCC | 90 | 1360 |
| | | | | | CATCCCCAGG | | |
| 1517682 | 3764 | 3783 | N/A | N/A | GCAGCACAGA | 66 | 1361 |
| | | | | | AGCCTCAGAA | | |
| 1517683 | 6229 | 6248 | 1131 | 1150 | AGTGATTGTC | 57 | 1362 |
| | | | | | GCTGGGCACA | | |
| 1517712 | 3377 | 3396 | N/A | N/A | GTCGGCCTCC | 93 | 1363 |
| | | | | | ATAGAAAATT | | |
| 1517713 | 6271 | 6290 | 1173 | 1192 | ACGGGGTGGC | 67 | 1364 |
| | | | | | GTGGGGTCGC | | |
| 1517721 | 4763 | 4782 | 245 | 264 | TTGCTCCACC | 96 | 1365 |
| | | | | | TTGGCCTGGC | | |
| 1517725 | 3569 | 3588 | N/A | N/A | AACTGTCAAT | 84 | 1366 |
| | | | | | CAACCGCCAG | | |
| 1517746 | 4907 | 4926 | 389 | 408 | GAGCAGCTCC | 28† | 1367 |
| | | | | | TCCTGCACCT | | |
| 1517765 | 3615 | 3634 | 189 | 208 | GAACCTTCAT | 74 | 1368 |
| | | | | | CTTCCTGCCT | | |
| 1517767 | 3475 | 3494 | N/A | N/A | TATCTGCAAC | 104 | 1369 |
| | | | | | AGCCTAATCC | | |
| 1517802 | 3059 | 3078 | N/A | N/A | TTACATCCCA | 73 | 1370 |
| | | | | | GTCCAGCTGC | | |
| 1517804 | 3665 | 3684 | N/A | N/A | AAGCCCCGCC | 82 | 1371 |
| | | | | | CCCATACCTG | | |
| 1517819 | 2879 | 2898 | 131 | 150 | CCAGCTCTTT | 75 | 1372 |
| | | | | | CTAGAGGCCC | | |
| 1517823 | 6311 | 6330 | 1213 | 1232 | GACAGGGTCT | 32 | 1373 |
| | | | | | CCCGCTGCAG | | |
| 1517828 | 4534 | 4553 | N/A | N/A | CTGAACATGG | 75 | 1374 |
| | | | | | TTCACTGCAA | | |
| 1517852 | 5054 | 5073 | N/A | N/A | AGCTAGAACC | 74† | 1375 |
| | | | | | AGCAGAGACC | | |
| 1517862 | 2970 | 2989 | N/A | N/A | GCTGCTTGCC | 79 | 1376 |
| | | | | | TCACCCCCGC | | |
| 1517884 | 2915 | 2934 | N/A | N/A | CCTGAGACTA | 87 | 1377 |
| | | | | | CCTGGAGGCC | | |
| 1517885 | 6361 | 6380 | 1263 | 1282 | GTGAATCTTT | 24 | 1378 |
| | | | | | ATTAAACTAG | | |
| 1517887 | 6209 | 6228 | 1111 | 1130 | GGGGCGGCGC | 89 | 1379 |
| | | | | | TGGTGCCCAC | | |
| 1517893 | 3657 | 3676 | N/A | N/A | CCCCCATACC | 78 | 1380 |
| | | | | | TGCCAGGAAT | | |
| 1517898 | 5097 | 5116 | N/A | N/A | AATTCCAGAG | 80† | 1381 |
| | | | | | AGCTAAAGCC | | |
| 1517903 | 3432 | 3451 | N/A | N/A | CAACCCATTC | 85 | 1382 |
| | | | | | CCTATTTAAC | | |
| 1517904 | 3165 | 3184 | N/A | N/A | CGTGTCGCTG | 84 | 1383 |
| | | | | | CCCCTGGCTC | | |
| 1517910 | 4207 | 4226 | N/A | N/A | GTATTCACTA | 78 | 1384 |
| | | | | | TCTGCCTGCA | | |

TABLE 24
Reduction of APOE RNA by 5-10-5 MOE gapmers with mixed PO/PS internucleoside
linkages at a concentration of 4000 nM in Hep3B cells plated at 20,000 cells
per well

| | SEQ ID | SEQ ID | SEQ ID | SEQ ID | | | |
|---|---|---|---|---|---|---|---|
| | No: 1 | No: 1 | No: 2 | No: 2 | | APOE | |
| Compound | Start | Stop | Start | Stop | | (% | SEQ ID |
| Number | Site | Site | Site | Site | Sequence (5′ to 3′) | UTC) | NO |
| 708024 | 6371 | 6390 | 1273 | 1292 | GTGAAACTTGGTGAATCTTT | 25 | 77 |
| 942595 | 6350 | 6369 | 1252 | 1271 | TTAAACTAGGGTCCACCCCA | 50 | 849 |
| 1517155 | 4206 | 4225 | N/A | N/A | TATTCACTATCTGCCTGCAA | 73 | 1385 |
| 1517157 | 6300 | 6319 | 1202 | 1221 | CCGCTGCAGGCTGCGCGGAG | 89 | 1386 |
| 1517158 | 6270 | 6289 | 1172 | 1191 | CGGGGTGGCGTGGGGTCGCA | 49 | 1387 |
| 1517160 | 6147 | 6166 | 1049 | 1068 | CATGTCTTCCACCAGGGGCT | 85 | 1388 |
| 1517162 | 4800 | 4819 | 282 | 301 | GCTGGCGCAGCTCGGGCTCC | 85 | 1389 |
| 1517166 | 3613 | 3632 | 187 | 206 | ACCTTCATCTTCCTGCCTGT | 61 | 1390 |
| 1517171 | 3473 | 3492 | N/A | N/A | TCTGCAACAGCCTAATCCCA | 71 | 1391 |
| 1517172 | 3216 | 3235 | N/A | N/A | ATGAGCTAATTCAGTCCTCA | 75 | 1392 |
| 1517175 | 6280 | 6299 | 1182 | 1201 | GCAGGAGGCACGGGGTGGCG | 49 | 1393 |
| 1517212 | 5096 | 5115 | N/A | N/A | ATTCCAGAGAGCTAAAGCCA | 72† | 1394 |
| 1517230 | 6207 | 6226 | 1109 | 1128 | GGCGGCGCTGGTGCCCACGG | 67 | 1395 |
| 1517255 | 4762 | 4781 | 244 | 263 | TGCTCCACCTTGGCCTGGCA | 96 | 1396 |
| 1517257 | 3847 | 3866 | N/A | N/A | AACAAAACAACTTCTAACTC | 102 | 1397 |
| 1517263 | 4606 | 4625 | N/A | N/A | TTAATCACTTGGAAAGCATT | 64 | 1398 |
| 1517270 | 3164 | 3183 | N/A | N/A | GTGTCGCTGCCCCTGGCTCC | 71 | 1399 |
| 1517312 | 4191 | 4210 | N/A | N/A | TGCAATGCATTAGAAACCTC | 62 | 1400 |
| 1517315 | 4976 | 4995 | N/A | N/A | GCCGCCCACCAGGAGGGTCA | 83† | 85 |
| 1517323 | 3376 | 3395 | N/A | N/A | TCGGCCTCCATAGAAAATTC | 76 | 1401 |
| 1517325 | 3365 | 3384 | N/A | N/A | AGAAAATTCCATCTTCCTCT | 77 | 1402 |
| 1517348 | 2959 | 2978 | N/A | N/A | CACCCCCGCTCCTCCTCTCC | 80 | 1403 |
| 1517358 | 3290 | 3309 | N/A | N/A | TCCCAGTCTCGCATTCCTCA | 70 | 1404 |
| 1517363 | 3441 | 3460 | N/A | N/A | AGCCGCCCCCAACCCATTCC | 69 | 1405 |
| 1517367 | 6260 | 6279 | 1162 | 1181 | TGGGGTCGCATGGCTGCAGG | 35 | 1406 |
| 1517372 | 3203 | 3222 | N/A | N/A | GTCCTCATTTTAAAGTTCTC | 77 | 1407 |
| 1517375 | 3431 | 3450 | N/A | N/A | AACCCATTCCCTATTTAACT | 87 | 1408 |
| 1517383 | 6360 | 6379 | 1262 | 1281 | TGAATCTTTATTAAACTAGG | 16 | 1409 |
| 1517390 | 2984 | 3003 | N/A | N /A | AGGTCCAGTCCCCTGCTGCT | 75 | 1410 |
| 1517404 | 3250 | 3269 | N/A | N/A | CTCCAACCTCACAGTTAAGC | 79 | 1411 |
| 1517410 | 3664 | 3683 | N/A | N/A | AGCCCCGCCCCCATACCTGC | 91 | 1412 |
| 1517424 | 6240 | 6259 | 1142 | 1161 | CTTCGGCGTTCAGTGATTGT | 54 | 1413 |
| 1517427 | 6363 | 6382 | 1265 | 1284 | TGGTGAATCTTTATTAAACT | 28 | 1193 |
| 1517432 | 6330 | 6349 | 1232 | 1251 | GGAGGACGGCTGGGGCGGGG | 76 | 1414 |
| 1517434 | 6227 | 6246 | 1129 | 1148 | TGATTGTCGCTGGGCACAGG | 67 | 1415 |
| 1517440 | N/A | N/A | 231 | 250 | CCTGGCATCCTGCCAGGAAT | 90 | 1416 |
| 1517443 | 3568 | 3587 | N/A | N/A | ACTGTCAATCAACCGCCAGT | 98 | 1417 |
| 1517468 | 3507 | 3526 | N/A | N/A | ACCCCAGGTTAGCCTTCCAA | 85 | 1418 |
| 1517473 | 3101 | 3120 | N/A | N/A | CTCGATAAATGATAGTGACA | 53 | 1419 |
| 1517497 | 3625 | 3644 | 199 | 218 | GCAGCCCACAGAACCTTCAT | 58 | 21 |
| 1517513 | 3548 | 3567 | N/A | N/A | GAGGACTCCTCCCACCCCCA | 103 | 1420 |
| 1517529 | 4902 | 4921 | 384 | 403 | GCTCCTCCTGCACCTGCTCA | 14† | 1421 |
| 1517536 | 2945 | 2964 | N/A | N/A | CTCTCCCCAAGCCCGACCCC | 87 | 1422 |
| 1517539 | 3058 | 3077 | N/A | N/A | TACATCCCAGTCCAGCTGCT | 87 | 1423 |
| 1517549 | 6187 | 6206 | 1089 | 1108 | CAGCCTGCACCTTCTCCACC | 66 | 1424 |
| 1517574 | 6310 | 6329 | 1212 | 1231 | ACAGGGTCTCCCGCTGCAGG | 24 | 1425 |
| 1517577 | 3837 | 3856 | N/A | N/A | CTTCTAACTCCTATCTCAAG | 83 | 1426 |
| 1517592 | 3463 | 3482 | N/A | N/A | CCTAATCCCAGCACATTTAC | 89 | 1427 |
| 1517607 | 4590 | 4609 | N/A | N/A | CATTATGTATTTATAAACAG | 72 | 1428 |
| 1517616 | 3395 | 3414 | N/A | N/A | TTATCTCCCCATCCCCAGGT | 72 | 1429 |
| 1517621 | 5039 | 5058 | N/A | N/A | AGACCCAGGCCCCCCAAGAC | 78† | 1430 |
| 1517645 | 2999 | 3018 | N/A | N/A | TGCCCAGCCCTTCCCAGGTC | 90 | 1431 |
| 1517649 | 3407 | 3426 | N/A | N/A | CCTGGTCTTCTCTTATCTCC | 96 | 1432 |
| 1517654 | 2878 | 2897 | 130 | 149 | CAGCTCTTTCTAGAGGCCCC | 65 | 1433 |
| 1517684 | 3042 | 3061 | N/A | N/A | TGCTCTCCCCACCCCACCTT | 77 | 1434 |
| 1517693 | 2914 | 2933 | N/A | N/A | CTGAGACTACCTGGAGGCCA | 81 | 1435 |
| 1517702 | 4181 | 4200 | N/A | N/A | TAGAAACCTCTAACTCCCAG | 96 | 1436 |
| 1517705 | 3338 | 3357 | N/A | N/A | TTCAAATTCCATCCCCCCAC | 75 | 1437 |
| 1517706 | 6340 | 6359 | 1242 | 1261 | GTCCACCCCAGGAGGACGGC | 86 | 73 |
| 1517720 | 4237 | 4256 | N/A | N/A | AGAATAAAGATCACAGCTGC | 67 | 1438 |
| 1517730 | 4778 | 4797 | 260 | 279 | CTCTGTCTCCACCGCTTGCT | 89 | 1439 |
| 1517736 | 4874 | 4893 | 356 | 375 | CTGCACCCAGCGCAGGTAAT | 28† | 1440 |
| 1517740 | 6250 | 6269 | 1152 | 1171 | TGGCTGCAGGCTTCGGCGTT | 49 | 1441 |
| 1517744 | 6320 | 6339 | 1222 | 1241 | TGGGGCGGGGACAGGGTCTC | 77 | 1442 |
| 1517749 | 3316 | 3335 | N/A | N/A | CCTCCCCACCGCCGGTTCCA | 71 | 1443 |
| 1517750 | 6290 | 6309 | 1192 | 1211 | CTGCGCGGAGGCAGGAGGCA | 61 | 1444 |
| 1517762 | 3486 | 3505 | N/A | N/A | CCTTGTTGCATTATCTGCAA | 92 | 1445 |
| 1517763 | 2860 | 2879 | 112 | 131 | CCTGAGCTCATCCCCGTGCC | 65 | 1446 |
| 1517772 | 2969 | 2988 | N/A | N/A | CTGCTTGCCTCACCCCCGCT | 74 | 1447 |
| 1517775 | 3419 | 3438 | N/A | N/A | ATTTAACTCCCTCCTGGTCT | 73 | 1448 |
| 1517789 | 5053 | 5072 | N/A | N/A | GCTAGAACCAGCAGAGACCC | 69† | 1449 |
| 1517803 | 3274 | 3293 | N/A | N/A | CTCATTCTCCCTTCACATTC | 78 | 1450 |
| 1517840 | 3262 | 3281 | N/A | N/A | TCACATTCTAAGCTCCAACC | 86 | 1451 |
| 1517844 | 6167 | 6186 | 1069 | 1088 | AGCCCGGCCCACTGGCGCTG | 70 | 1452 |
| 1517851 | 4664 | 4683 | N/A | N/A | AGGTGCTCCACAAATGCTTC | 67 | 1453 |
| 1517883 | 4307 | 4326 | N/A | N/A | CCGCGCCCAGCGGAAAAGCA | 73 | 1454 |
| 1517900 | 3759 | 3778 | N/A | N/A | ACAGAAGCCTCAGAAGAGGG | 77 | 1455 |
| 1517909 | 3523 | 3542 | N/A | N/A | GCCCCAACCCGGCCTCACCC | 91 | 1456 |

TABLE 25
Reduction of APOE RNA by 5-10-5 MOE gapmers with mixed PO/PS internucleoside
linkages at a concentration of 4000 nM in Hep3B cells plated at 20,000 cells
per well

| | SEQ ID | SEQ ID | SEQ ID | SEQ ID | | | |
|---|---|---|---|---|---|---|---|
| | No: 1 | No: 1 | No: 2 | No: 2 | | APOE | |
| Compound | Start | Stop | Start | Stop | | (% | SEQ ID |
| Number | Site | Site | Site | Site | Sequence (5′ to 3′) | UTC) | NO |
| 942594 | 6349 | 6368 | 1251 | 1270 | TAAACTAGGGTCCACCCCAG | 79 | 776 |
| 1517154 | 3202 | 3221 | N/A | N/A | TCCTCATTTTAAAGTTCTCC | 80 | 1457 |
| 1517156 | 5052 | 5071 | N/A | N/A | CTAGAACCAGCAGAGACCCA | 76† | 1458 |
| 1517164 | 6319 | 6338 | 1221 | 1240 | GGGGCGGGGACAGGGTCTCC | 124 | 1459 |
| 1517182 | 6299 | 6318 | 1201 | 1220 | CGCTGCAGGCTGCGCGGAGG | 52 | 1460 |
| 1517208 | 6269 | 6288 | 1171 | 1190 | GGGGTGGCGTGGGGTCGCAT | 26 | 1461 |
| 1517238 | 3430 | 3449 | N/A | N/A | ACCCATTCCCTATTTAACTC | 103 | 1462 |
| 1517249 | 3505 | 3524 | N/A | N/A | CCCAGGTTAGCCTTCCAAGC | 81 | 1463 |
| 1517250 | 3057 | 3076 | N/A | N/A | ACATCCCAGTCCAGCTGCTC | 90 | 1464 |
| 1517261 | 3289 | 3308 | N/A | N/A | CCCAGTCTCGCATTCCTCAT | 80 | 1465 |
| 1517274 | 6279 | 6298 | 1181 | 1200 | CAGGAGGCACGGGGTGGCGT | 59 | 1466 |
| 1517275 | 6289 | 6308 | 1191 | 1210 | TGCGCGGAGGCAGGAGGCAC | 76 | 1467 |
| 1517277 | 2859 | 2878 | 111 | 130 | CTGAGCTCATCCCCGTGCCC | 113 | 1468 |
| 1517281 | 6309 | 6328 | 1211 | 1230 | CAGGGTCTCCCGCTGCAGGC | 30 | 1469 |
| 1517288 | 3163 | 3182 | N/A | N/A | TGTCGCTGCCCCTGGCTCCC | 89 | 1470 |
| 1517301 | 3836 | 3855 | N/A | N/A | TTCTAACTCCTATCTCAAGG | 108 | 1471 |
| 1517307 | 4777 | 4796 | 259 | 278 | TCTGTCTCCACCGCTTGCTC | 115 | 1472 |
| 1517329 | 3394 | 3413 | N/A | N/A | TATCTCCCCATCCCCAGGTC | 106 | 1473 |
| 1517338 | 4944 | 4963 | N/A | N/A | GGGACACTCACCTCAGTTCC | 98† | 1474 |
| 1517339 | 3663 | 3682 | N/A | N/A | GCCCCGCCCCCATACCTGCC | 105 | 1475 |
| 1517344 | 3374 | 3393 | N/A | N/A | GGCCTCCATAGAAAATTCCA | 110 | 1476 |
| 1517346 | 3337 | 3356 | N/A | N/A | TCAAATTCCATCCCCCCACC | 94 | 1477 |
| 1517349 | 4302 | 4321 | N/A | N/A | CCCAGCGGAAAAGCATGTAT | 108 | 1478 |
| 1517368 | 3846 | 3865 | N/A | N/A | ACAAAACAACTTCTAACTCC | 123 | 1479 |
| 1517382 | 3418 | 3437 | N/A | N/A | TTTAACTCCCTCCTGGTCTT | 99 | 1480 |
| 1517386 | 3485 | 3504 | N/A | N/A | CTTGTTGCATTATCTGCAAC | 111 | 1481 |
| 1517408 | 3566 | 3585 | N/A | N/A | TGTCAATCAACCGCCAGTGA | 106 | 1482 |
| 1517411 | 2955 | 2974 | N/A | N/A | CCCGCTCCTCCTCTCCCCAA | 111 | 1483 |
| 1517417 | 2968 | 2987 | N/A | N/A | TGCTTGCCTCACCCCCGCTC | 110 | 1484 |
| 1517425 | 3611 | 3630 | 185 | 204 | CTTCATCTTCCTGCCTGTGA | 78 | 1485 |
| 1517427 | 6363 | 6382 | 1265 | 1284 | TGGTGAATCTTTATTAAACT | 18 | 1193 |
| 1517436 | 6145 | 6164 | 1047 | 1066 | TGTCTTCCACCAGGGGCTCG | 104 | 1486 |
| 1517449 | 5038 | 5057 | N/A | N/A | GACCCAGGCCCCCCAAGACT | 103† | 1487 |
| 1517452 | 4796 | 4815 | 278 | 297 | GCGCAGCTCGGGCTCCGGCT | 126 | 1488 |
| 1517462 | 3249 | 3268 | N/A | N/A | TCCAACCTCACAGTTAAGCG | 83 | 1489 |
| 1517471 | 2943 | 2962 | N/A | N/A | CTCCCCAAGCCCGACCCCGA | 92 | 1490 |
| 1517478 | 6165 | 6184 | 1067 | 1086 | CCCGGCCCACTGGCGCTGCA | 91 | 1491 |
| 1517503 | 3522 | 3541 | N/A | N/A | CCCCAACCCGGCCTCACCCC | 101 | 1492 |
| 1517508 | 6359 | 6378 | 1261 | 1280 | GAATCTTTATTAAACTAGGG | 18 | 1493 |
| 1517518 | 3462 | 3481 | N/A | N/A | CTAATCCCAGCACATTTACC | 83 | 1494 |
| 1517550 | 4180 | 4199 | N/A | N/A | AGAAACCTCTAACTCCCAGC | 77 | 1495 |
| 1517552 | N/A | N/A | 226 | 245 | CATCCTGCCAGGAATGTGAC | 102 | 26 |
| 1517564 | 4663 | 4682 | N/A | N/A | GGTGCTCCACAAATGCTTCT | 107 | 1496 |
| 1517568 | 4236 | 4255 | N/A | N/A | GAATAAAGATCACAGCTGCC | 93 | 1497 |
| 1517570 | 6185 | 6204 | 1087 | 1106 | GCCTGCACCTTCTCCACCAG | 79 | 1498 |
| 1517585 | 3406 | 3425 | N/A | N/A | CTGGTCTTCTCTTATCTCCC | 99 | 1499 |
| 1517591 | 3472 | 3491 | N/A | N/A | CTGCAACAGCCTAATCCCAG | 102 | 1500 |
| 1517611 | 2998 | 3017 | N/A | N/A | GCCCAGCCCTTCCCAGGTCC | 101 | 1501 |
| 1517624 | 2891 | 2910 | 143 | 162 | GTTCCCAGGGTCCCAGCTCT | 112 | 1502 |
| 1517638 | 3213 | 3232 | N/A | N/A | AGCTAATTCAGTCCTCATTT | 88 | 1503 |
| 1517640 | 2983 | 3002 | N/A | N/A | GGTCCAGTCCCCTGCTGCTT | 102 | 1504 |
| 1517671 | 5093 | 5112 | N/A | N/A | CCAGAGAGCTAAAGCCAGGA | 93† | 1505 |
| 1517708 | 3542 | 3561 | N/A | N/A | TCCTCCCACCCCCAGCCCGG | 110 | 1506 |
| 1517729 | 6249 | 6268 | 1151 | 1170 | GGCTGCAGGCTTCGGCGTTC | 31 | 1507 |
| 1517739 | 6339 | 6358 | 1241 | 1260 | TCCACCCCAGGAGGACGGCT | 99 | 1508 |
| 1517742 | 3364 | 3383 | N/A | N/A | GAAAATTCCATCTTCCTCTC | 77 | 1509 |
| 1517747 | 6205 | 6224 | 1107 | 1126 | CGGCGCTGGTGCCCACGGCA | 91 | 1510 |
| 1517764 | 3312 | 3331 | N/A | N/A | CCCACCGCCGGTTCCATCTC | 105 | 1511 |
| 1517768 | 6239 | 6258 | 1141 | 1160 | TTCGGCGTTCAGTGATTGTC | 65 | 1512 |
| 1517769 | 4601 | 4620 | N/A | N/A | CACTTGGAAAGCATTATGTA | 91 | 1513 |
| 1517777 | 3623 | 3642 | 197 | 216 | AGCCCACAGAACCTTCATCT | 72 | 1514 |
| 1517778 | 3673 | 3692 | N/A | N/A | AACCGAGCAAGCCCCGCCCC | 104 | 1515 |
| 1517795 | 6329 | 6348 | 1231 | 1250 | GAGGACGGCTGGGGCGGGGA | 109 | 1516 |
| 1517799 | 2872 | 2891 | 124 | 143 | TTTCTAGAGGCCCCTGAGCT | 101 | 1517 |
| 1517810 | 3037 | 3056 | N/A | N/A | TCCCCACCCCACCTTCTAGC | 101 | 1518 |
| 1517818 | 6225 | 6244 | 1127 | 1146 | ATTGTCGCTGGGCACAGGGG | 87 | 1519 |
| 1517833 | 3440 | 3459 | N/A | N/A | GCCGCCCCCAACCCATTCCC | 108 | 1520 |
| 1517838 | 3261 | 3280 | N/A | N/A | CACATTCTAAGCTCCAACCT | 87 | 1521 |
| 1517839 | 4190 | 4209 | N/A | N/A | GCAATGCATTAGAAACCTCT | 87 | 1522 |
| 1517843 | 4205 | 4224 | N/A | N/A | ATTCACTATCTGCCTGCAAT | 97 | 1523 |
| 1517850 | 3273 | 3292 | N/A | N/A | TCATTCTCCCTTCACATTCT | 90 | 1524 |
| 1517863 | 4900 | 4919 | 382 | 401 | TCCTCCTGCACCTGCTCAGA | 17† | 1525 |
| 1517874 | 6370 | 6389 | 1272 | 1291 | TGAAACTTGGTGAATCTTTA | 23 | 1526 |
| 1517877 | 6259 | 6278 | 1161 | 1180 | GGGGTCGCATGGCTGCAGGC | 64 | 1527 |
| 1517889 | 4842 | 4861 | 324 | 343 | CCAGTGCCAGTTCCCAGCGC | 135† | 1528 |
| 1517896 | 4760 | 4779 | 242 | 261 | CTCCACCTTGGCCTGGCATC | 120 | 1529 |
| 1517899 | 4587 | 4606 | N/A | N/A | TATGTATTTATAAACAGGGT | 110 | 1530 |
| 1517907 | 3077 | 3096 | N/A | N/A | GTGGAGTCCTGCTATGGCTT | 100 | 1531 |

TABLE 26
Reduction of APOE RNA by 5-10-5 MOE gapmers with mixed PO/PS internucleoside linkages
at a concentration of 4000 nM in Hep3B cells plated at 20,000 cells per well

| | SEQ ID | SEQ ID | SEQ ID | SEQ ID | | | |
|---|---|---|---|---|---|---|---|
| | No: 1 | No: 1 | No: 2 | No: 2 | | APOE | |
| Compound | Start | Stop | Start | Stop | | (% | SEQ ID |
| Number | Site | Site | Site | Site | Sequence (5′ to 3′) | UTC) | NO |
| 1517176 | 4586 | 4605 | N/A | N/A | ATGTATTTATAAACAGGGTC | 94 | 1532 |
| 1517184 | 3260 | 3279 | N/A | N/A | ACATTCTAAGCTCCAACCTC | 98 | 1533 |
| 1517185 | 4235 | 4254 | N/A | N/A | AATAAAGATCACAGCTGCCC | 81 | 1534 |
| 1517186 | 6278 | 6297 | 1180 | 1199 | AGGAGGCACGGGGTGGCGTG | 104 | 1535 |
| 1517215 | 3504 | 3523 | N/A | N/A | CCAGGTTAGCCTTCCAAGCC | 91 | 1536 |
| 1517221 | 4600 | 4619 | N/A | N/A | ACTTGGAAAGCATTATGTAT | 97 | 1537 |
| 1517240 | 6223 | 6242 | 1125 | 1144 | TGTCGCTGGGCACAGGGGCG | 103 | 1538 |
| 1517259 | 3200 | 3219 | N/A | N/A | CTCATTTTAAAGTTCTCCAA | 89 | 1539 |
| 1517279 | 6298 | 6317 | 1200 | 1219 | GCTGCAGGCTGCGCGGAGGC | 52 | 1540 |
| 1517282 | 6258 | 6277 | 1160 | 1179 | GGGTCGCATGGCTGCAGGCT | 72 | 1541 |
| 1517299 | 6143 | 6162 | 1045 | 1064 | TCTTCCACCAGGGGCTCGAA | 107 | 1542 |
| 1517314 | 3212 | 3231 | N/A | N/A | GCTAATTCAGTCCTCATTTT | 99 | 1543 |
| 1517330 | 3672 | 3691 | N/A | N/A | ACCGAGCAAGCCCCGCCCCC | 75 | 1544 |
| 1517332 | 3373 | 3392 | N/A | N/A | GCCTCCATAGAAAATTCCAT | 107 | 1545 |
| 1517334 | 3835 | 3854 | N/A | N/A | TCTAACTCCTATCTCAAGGA | 93 | 1546 |
| 1517384 | 2858 | 2877 | 110 | 129 | TGAGCTCATCCCCGTGCCCC | 111 | 1547 |
| 1517387 | 5037 | 5056 | N/A | N/A | ACCCAGGCCCCCCAAGACTT | 99† | 1548 |
| 1517400 | 6348 | 6367 | 1250 | 1269 | AAACTAGGGTCCACCCCAGG | 90 | 1549 |
| 1517403 | 3610 | 3629 | 184 | 203 | TTCATCTTCCTGCCTGTGAT | 85 | 1550 |
| 1517413 | 2997 | 3016 | N/A | N/A | CCCAGCCCTTCCCAGGTCCA | 111 | 1551 |
| 1517415 | 3302 | 3321 | N/A | N/A | GTTCCATCTCAGTCCCAGTC | 95 | 1552 |
| 1517416 | 3393 | 3412 | N/A | N/A | ATCTCCCCATCCCCAGGTCG | 94 | 1553 |
| 1517427 | 6363 | 6382 | 1265 | 1284 | TGGTGAATCTTTATTAAACT | 44 | 1193 |
| 1517431 | 4826 | 4845 | 308 | 327 | GCGCTGGCCGCTCTGCCACT | 166 | 1554 |
| 1517433 | 6203 | 6222 | 1105 | 1124 | GCGCTGGTGCCCACGGCAGC | 100 | 1555 |
| 1517437 | 4899 | 4918 | 381 | 400 | CCTCCTGCACCTGCTCAGAC | 20† | 1556 |
| 1517439 | 4662 | 4681 | N/A | N/A | GTGCTCCACAAATGCTTCTT | 113 | 1557 |
| 1517457 | 2954 | 2973 | N/A | N/A | CCGCTCCTCCTCTCCCCAAG | 114 | 1558 |
| 1517475 | 2871 | 2890 | 123 | 142 | TTCTAGAGGCCCCTGAGCTC | 101 | 1559 |
| 1517490 | 3461 | 3480 | N/A | N/A | TAATCCCAGCACATTTACCA | 90 | 1560 |
| 1517496 | 3288 | 3307 | N/A | N/A | CCAGTCTCGCATTCCTCATT | 117 | 1561 |
| 1517507 | 6238 | 6257 | 1140 | 1159 | TCGGCGTTCAGTGATTGTCG | 92 | 1562 |
| 1517517 | 3158 | 3177 | N/A | N/A | CTGCCCCTGGCTCCCCAGTT | 102 | 1563 |
| 1517519 | 6369 | 6388 | 1271 | 1290 | GAAACTTGGTGAATCTTTAT | 30 | 1564 |
| 1517540 | 3417 | 3436 | N/A | N/A | TTAACTCCCTCCTGGTCTTC | 111 | 1565 |
| 1517541 | 3845 | 3864 | N/A | N/A | CAAAACAACTTCTAACTCCT | 92 | 1566 |
| 1517553 | 3336 | 3355 | N/A | N/A | CAAATTCCATCCCCCCACCC | 98 | 1567 |
| 1517580 | 4179 | 4198 | N/A | N/A | GAAACCTCTAACTCCCAGCC | 93 | 1568 |
| 1517593 | 6163 | 6182 | 1065 | 1084 | CGGCCCACTGGCGCTGCATG | 94 | 1569 |
| 1517602 | 3363 | 3382 | N/A | N/A | AAAATTCCATCTTCCTCTCC | 91 | 1570 |
| 1517608 | 6288 | 6307 | 1190 | 1209 | GCGCGGAGGCAGGAGGCACG | 70 | 1571 |
| 1517622 | 6308 | 6327 | 1210 | 1229 | AGGGTCTCCCGCTGCAGGCT | 52 | 1572 |
| 1517623 | 4201 | 4220 | N/A | N/A | ACTATCTGCCTGCAATGCAT | 84 | 1573 |
| 1517627 | 4776 | 4795 | 258 | 277 | CTGTCTCCACCGCTTGCTCC | 121 | 1574 |
| 1517647 | 2941 | 2960 | N/A | N/A | CCCCAAGCCCGACCCCGAGT | 96 | 1575 |
| 1517652 | 6358 | 6377 | 1260 | 1279 | AATCTTTATTAAACTAGGGT | 41 | 1576 |
| 1517658 | 4790 | 4809 | 272 | 291 | CTCGGGCTCCGGCTCTGTCT | 119 | 1577 |
| 1517668 | 3429 | 3448 | N/A | N/A | CCCATTCCCTATTTAACTCC | 94 | 1578 |
| 1517676 | 6183 | 6202 | 1085 | 1104 | CTGCACCTTCTCCACCAGCC | 86 | 1579 |
| 1517689 | 3560 | 3579 | N/A | N/A | TCAACCGCCAGTGAGGACTC | 100 | 1580 |
| 1517703 | 3056 | 3075 | N/A | N/A | CATCCCAGTCCAGCTGCTCT | 100 | 1581 |
| 1517707 | 3036 | 3055 | N/A | N/A | CCCCACCCCACCTTCTAGCG | 77 | 1582 |
| 1517709 | 2980 | 2999 | N/A | N/A | CCAGTCCCCTGCTGCTTGCC | 99 | 1583 |
| 1517715 | 6338 | 6357 | 1240 | 1259 | CCACCCCAGGAGGACGGCTG | 91 | 1584 |
| 1517723 | 3229 | 3248 | N/A | N/A | CCGTGTTCCATTTATGAGCT | 83 | 1585 |
| 1517727 | 3405 | 3424 | N/A | N/A | TGGTCTTCTCTTATCTCCCC | 101 | 1586 |
| 1517748 | 4189 | 4208 | N/A | N/A | CAATGCATTAGAAACCTCTA | 86 | 1587 |
| 1517784 | 2967 | 2986 | N/A | N/A | GCTTGCCTCACCCCCGCTCC | 95 | 1588 |
| 1517788 | 2889 | 2908 | 141 | 160 | TCCCAGGGTCCCAGCTCTTT | 114 | 1589 |
| 1517793 | 6248 | 6267 | 1150 | 1169 | GCTGCAGGCTTCGGCGTTCA | 53 | 1590 |
| 1517805 | 4754 | 4773 | N/A | N/A | CTTGGCCTGGCATCCTGTGT | 98 | 1591 |
| 1517808 | 3662 | 3681 | N/A | N/A | CCCCGCCCCCATACCTGCCA | 113 | 1592 |
| 1517815 | 3622 | 3641 | 196 | 215 | GCCCACAGAACCTTCATCTT | 88 | 1593 |
| 1517822 | 3534 | 3553 | N/A | N/A | CCCCCAGCCCGGCCCCAACC | 145 | 1594 |
| 1517835 | 3484 | 3503 | N/A | N/A | TTGTTGCATTATCTGCAACA | 99 | 1595 |
| 1517836 | 3521 | 3540 | N/A | N/A | CCCAACCCGGCCTCACCCCA | 89 | 1596 |
| 1517847 | 5049 | 5068 | N/A | N/A | GAACCAGCAGAGACCCAGGC | 102† | 1597 |
| 1517854 | 3072 | 3091 | N/A | N/A | GTCCTGCTATGGCTTACATC | 101 | 1598 |
| 1517858 | 4301 | 4320 | N/A | N/A | CCAGCGGAAAAGCATGTATT | 100 | 1599 |
| 1517861 | 6268 | 6287 | 1170 | 1189 | GGGTGGCGTGGGGTCGCATG | 77 | 1600 |
| 1517867 | 3471 | 3490 | N/A | N/A | TGCAACAGCCTAATCCCAGC | 108 | 1601 |
| 1517875 | 3651 | 3670 | N/A | N/A | TACCTGCCAGGAATGTGACC | 107 | 1602 |
| 1517878 | 6318 | 6337 | 1220 | 1239 | GGGCGGGGACAGGGTCTCCC | 67 | 1603 |
| 1517886 | 4943 | 4962 | N/A | N/A | GGACACTCACCTCAGTTCCT | 125† | 1604 |
| 1517890 | 3272 | 3291 | N/A | N/A | CATTCTCCCTTCACATTCTA | 110 | 1605 |
| 1517892 | 3439 | 3458 | N/A | N/A | CCGCCCCCAACCCATTCCCT | 133 | 1606 |
| 1517901 | 6328 | 6347 | 1230 | 1249 | AGGACGGCTGGGGCGGGGAC | 150 | 1607 |
| 1517911 | 5091 | 5110 | N/A | N/A | AGAGAGCTAAAGCCAGGAGT | 115† | 1608 |

TABLE 27
Reduction of APOE RNA by 5-10-5 MOE gapmers with mixed PO/PS internucleoside linkages
at a concentration of 4000 nM in Hep3B cells plated at 20,000 cells per well

| | SEQ ID | SEQ ID | SEQ ID | SEQ ID | | | |
|---|---|---|---|---|---|---|---|
| | No: 1 | No: 1 | No: 2 | No: 2 | | APOE | |
| Compound | Start | Stop | Start | Stop | | (% | SEQ ID |
| Number | Site | Site | Site | Site | Sequence (5′ to 3′) | UTC) | NO |
| 708022 | 6257 | 6276 | 1159 | 1178 | GGTCGCATGGCTGCAGGCTT | 36 | 71 |
| 942593 | 6347 | 6366 | 1249 | 1268 | AACTAGGGTCCACCCCAGGA | 45 | 75 |
| 1517144 | 4200 | 4219 | N/A | N/A | CTATCTGCCTGCAATGCATT | 75 | 1609 |
| 1517147 | 2940 | 2959 | N/A | N/A | CCCAAGCCCGACCCCGAGTA | 108 | 1610 |
| 1517193 | 6267 | 6286 | 1169 | 1188 | GGTGGCGTGGGGTCGCATGG | 54 | 1611 |
| 1517203 | 2888 | 2907 | 140 | 159 | CCCAGGGTCCCAGCTCTTTC | 65 | 78 |
| 1517206 | 4272 | 4291 | N/A | N/A | TGTGTGCCCCAGGCAGGGCT | 112 | 83 |
| 1517217 | 3519 | 3538 | N/A | N/A | CAACCCGGCCTCACCCCAGG | 103 | 1612 |
| 1517218 | 2953 | 2972 | N/A | N/A | CGCTCCTCCTCTCCCCAAGC | 92 | 1613 |
| 1517223 | 3391 | 3410 | N/A | N/A | CTCCCCATCCCCAGGTCGGC | 82 | 1614 |
| 1517224 | 3259 | 3278 | N/A | N/A | CATTCTAAGCTCCAACCTCA | 80 | 1615 |
| 1517243 | N/A | N/A | 225 | 244 | ATCCTGCCAGGAATGTGACC | 97 | 1616 |
| 1517265 | 3362 | 3381 | N/A | N/A | AAATTCCATCTTCCTCTCCC | 95 | 1617 |
| 1517267 | 2996 | 3015 | N/A | N/A | CCAGCCCTTCCCAGGTCCAG | 83 | 1618 |
| 1517268 | 5090 | 5109 | N/A | N/A | GAGAGCTAAAGCCAGGAGTC | 83† | 1619 |
| 1517269 | 4898 | 4917 | 380 | 399 | CTCCTGCACCTGCTCAGACA | 15† | 1620 |
| 1517271 | 4234 | 4253 | N/A | N/A | ATAAAGATCACAGCTGCCCC | 90 | 1621 |
| 1517283 | 3301 | 3320 | N/A | N/A | TTCCATCTCAGTCCCAGTCT | 74 | 1622 |
| 1517302 | 2857 | 2876 | 109 | 128 | GAGCTCATCCCCGTGCCCCC | 79 | 1623 |
| 1517303 | 4941 | 4960 | N/A | N/A | ACACTCACCTCAGTTCCTGG | 94† | 1624 |
| 1517319 | 5048 | 5067 | N/A | N/A | AACCAGCAGAGACCCAGGCC | 101† | 1625 |
| 1517340 | 4789 | 4808 | 271 | 290 | TCGGGCTCCGGCTCTGTCTC | 91 | 1626 |
| 1517359 | 6247 | 6266 | 1149 | 1168 | CTGCAGGCTTCGGCGTTCAG | 63 | 1627 |
| 1517364 | 6287 | 6306 | 1189 | 1208 | CGCGGAGGCAGGAGGCACGG | 61 | 1628 |
| 1517374 | 3671 | 3690 | N/A | N/A | CCGAGCAAGCCCCGCCCCCA | 77 | 1629 |
| 1517381 | 3211 | 3230 | N/A | N/A | CTAATTCAGTCCTCATTTTA | 85 | 1630 |
| 1517389 | 4717 | 4736 | N/A | N/A | GGTCAGGGTCCTTCTGACCC | 104 | 1631 |
| 1517394 | 3482 | 3501 | N/A | N/A | GTTGCATTATCTGCAACAGC | 86 | 1632 |
| 1517407 | 6237 | 6256 | 1139 | 1158 | CGGCGTTCAGTGATTGTCGC | 66 | 1633 |
| 1517409 | 2870 | 2889 | 122 | 141 | TCTAGAGGCCCCTGAGCTCA | 102 | 1634 |
| 1517427 | 6363 | 6382 | 1265 | 1284 | TGGTGAATCTTTATTAAACT | 20 | 1193 |
| 1517429 | 3225 | 3244 | N/A | N/A | GTTCCATTTATGAGCTAATT | 78 | 1635 |
| 1517444 | 4824 | 4843 | 306 | 325 | GCTGGCCGCTCTGCCACTCG | 96 | 1636 |
| 1517451 | 4188 | 4207 | N/A | N/A | AATGCATTAGAAACCTCTAA | 92 | 1637 |
| 1517453 | 3199 | 3218 | N/A | N/A | TCATTTTAAAGTTCTCCAAT | 77 | 1638 |
| 1517480 | 3428 | 3447 | N/A | N/A | CCATTCCCTATTTAACTCCC | 82 | 1639 |
| 1517499 | 3503 | 3522 | N/A | N/A | CAGGTTAGCCTTCCAAGCCT | 84 | 1640 |
| 1517502 | 3035 | 3054 | N/A | N/A | CCCACCCCACCTTCTAGCGG | 77 | 1641 |
| 1517520 | 3834 | 3853 | N/A | N/A | CTAACTCCTATCTCAAGGAT | 94 | 1642 |
| 1517534 | 3844 | 3863 | N/A | N/A | AAAACAACTTCTAACTCCTA | 81 | 1643 |
| 1517547 | 3460 | 3479 | N/A | N/A | AATCCCAGCACATTTACCAA | 89 | 1644 |
| 1517551 | 6141 | 6160 | 1043 | 1062 | TTCCACCAGGGGCTCGAACC | 95 | 1645 |
| 1517567 | 4599 | 4618 | N/A | N/A | CTTGGAAAGCATTATGTATT | 87 | 1646 |
| 1517575 | 4775 | 4794 | 257 | 276 | TGTCTCCACCGCTTGCTCCA | 109 | 1647 |
| 1517576 | 3157 | 3176 | N/A | N/A | TGCCCCTGGCTCCCCAGTTA | 103 | 1648 |
| 1517590 | 3287 | 3306 | N/A | N/A | CAGTCTCGCATTCCTCATTC | 86 | 1649 |
| 1517596 | 6337 | 6356 | 1239 | 1258 | CACCCCAGGAGGACGGCTGG | 105 | 1650 |
| 1517597 | 4585 | 4604 | N/A | N/A | TGTATTTATAAACAGGGTCT | 83 | 1651 |
| 1517599 | 3438 | 3457 | N/A | N/A | CGCCCCCAACCCATTCCCTA | 85 | 1652 |
| 1517604 | 6307 | 6326 | 1209 | 1228 | GGGTCTCCCGCTGCAGGCTG | 29 | 1653 |
| 1517610 | 6201 | 6220 | 1103 | 1122 | GCTGGTGCCCACGGCAGCCT | 94 | 1654 |
| 1517639 | 3532 | 3551 | N/A | N/A | CCCAGCCCGGCCCCAACCCG | 85 | 1655 |
| 1517641 | 4661 | 4680 | N/A | N/A | TGCTCCACAAATGCTTCTTT | 86 | 1656 |
| 1517643 | 3416 | 3435 | N/A | N/A | TAACTCCCTCCTGGTCTTCT | 91 | 1657 |
| 1517650 | 3555 | 3574 | N/A | N/A | CGCCAGTGAGGACTCCTCCC | 97 | 1658 |
| 1517651 | 3621 | 3640 | 195 | 214 | CCCACAGAACCTTCATCTTC | 37 | 1659 |
| 1517656 | 6327 | 6346 | 1229 | 1248 | GGACGGCTGGGGCGGGGACA | 97 | 1660 |
| 1517661 | 3271 | 3290 | N/A | N/A | ATTCTCCCTTCACATTCTAA | 86 | 1661 |
| 1517663 | 3372 | 3391 | N/A | N/A | CCTCCATAGAAAATTCCATC | 59 | 1662 |
| 1517674 | 3055 | 3074 | N/A | N/A | ATCCCAGTCCAGCTGCTCTC | 90 | 1663 |
| 1517680 | 4178 | 4197 | N/A | N/A | AAACCTCTAACTCCCAGCCA | 81 | 1664 |
| 1517690 | 6317 | 6336 | 1219 | 1238 | GGCGGGGACAGGGTCTCCCG | 64 | 1665 |
| 1517692 | 6221 | 6240 | 1123 | 1142 | TCGCTGGGCACAGGGGCGGC | 82 | 1666 |
| 1517699 | 2966 | 2985 | N/A | N/A | CTTGCCTCACCCCCGCTCCT | 88 | 1667 |
| 1517726 | 6161 | 6180 | 1063 | 1082 | GCCCACTGGCGCTGCATGTC | 56 | 1668 |
| 1517732 | 3070 | 3089 | N/A | N/A | CCTGCTATGGCTTACATCCC | 84 | 1669 |
| 1517753 | 5036 | 5055 | N/A | N/A | CCCAGGCCCCCCAAGACTTA | 99† | 1670 |
| 1517776 | 3470 | 3489 | N/A | N/A | GCAACAGCCTAATCCCAGCA | 82 | 1671 |
| 1517780 | N/A | N/A | 236 | 255 | CTTGGCCTGGCATCCTGCCA | 103 | 1672 |
| 1517791 | 3609 | 3628 | 183 | 202 | TCATCTTCCTGCCTGTGATT | 78 | 1673 |
| 1517812 | 6297 | 6316 | 1199 | 1218 | CTGCAGGCTGCGCGGAGGCA | 41 | 1674 |
| 1517821 | 6277 | 6296 | 1179 | 1198 | GGAGGCACGGGGTGGCGTGG | 92 | 1675 |
| 1517826 | 6181 | 6200 | 1083 | 1102 | GCACCTTCTCCACCAGCCCG | 93 | 1676 |
| 1517832 | 3332 | 3351 | N/A | N/A | TTCCATCCCCCCACCCCCTC | 85 | 1677 |
| 1517841 | 6357 | 6376 | 1259 | 1278 | ATCTTTATTAAACTAGGGTC | 24 | 1678 |
| 1517842 | 6368 | 6387 | 1270 | 1289 | AAACTTGGTGAATCTTTATT | 32 | 1679 |
| 1517846 | 2979 | 2998 | N/A | N/A | CAGTCCCCTGCTGCTTGCCT | 89 | 1680 |
| 1517857 | 3404 | 3423 | N/A | N/A | GGTCTTCTCTTATCTCCCCA | 92 | 1681 |

TABLE 28
Reduction of APOE RNA by 5-10-5 MOE gapmers with mixed PO/PS internucleoside linkages
at a concentration of 4000 nM in Hep3B cells plated at 20,000 cells per well

| | SEQ ID | SEQ ID | SEQ ID | SEQ ID | | | |
|---|---|---|---|---|---|---|---|
| | No: 1 | No: 1 | No: 2 | No: 2 | | APOE | |
| Compound | Start | Stop | Start | Stop | | (% | SEQ ID |
| Number | Site | Site | Site | Site | Sequence (5′ to 3′) | UTC) | NO |
| 942588 | 6256 | 6275 | 1158 | 1177 | GTCGCATGGCTGCAGGCTTC | 23 | 1132 |
| 1517141 | 4939 | 4958 | N/A | N/A | ACTCACCTCAGTTCCTGGGT | 92† | 1682 |
| 1517146 | 6236 | 6255 | 1138 | 1157 | GGCGTTCAGTGATTGTCGCT | 73 | 1683 |
| 1517153 | 3286 | 3305 | N/A | N/A | AGTCTCGCATTCCTCATTCT | 79 | 1684 |
| 1517159 | 4598 | 4617 | N/A | N/A | TTGGAAAGCATTATGTATTT | 115 | 1685 |
| 1517181 | 3481 | 3500 | N/A | N/A | TTGCATTATCTGCAACAGCC | 80 | 1686 |
| 1517189 | 3403 | 3422 | N/A | N/A | GTCTTCTCTTATCTCCCCAT | 87 | 1687 |
| 1517190 | 2965 | 2984 | N/A | N/A | TTGCCTCACCCCCGCTCCTC | 102 | 1688 |
| 1517198 | 3620 | 3639 | 194 | 213 | CCACAGAACCTTCATCTTCC | 65 | 1689 |
| 1517202 | 6286 | 6305 | 1188 | 1207 | GCGGAGGCAGGAGGCACGGG | 73 | 1690 |
| 1517204 | 3661 | 3680 | N/A | N/A | CCCGCCCCCATACCTGCCAG | 104 | 1691 |
| 1517205 | 3518 | 3537 | N/A | N/A | AACCCGGCCTCACCCCAGGT | 87 | 1692 |
| 1517213 | 6199 | 6218 | 1101 | 1120 | TGGTGCCCACGGCAGCCTGC | 99 | 1693 |
| 1517216 | 3069 | 3088 | N/A | N/A | CTGCTATGGCTTACATCCCA | 82 | 1694 |
| 1517220 | 6367 | 6386 | 1269 | 1288 | AACTTGGTGAATCTTTATTA | 23 | 1695 |
| 1517225 | 3502 | 3521 | N/A | N/A | AGGTTAGCCTTCCAAGCCTT | 93 | 1696 |
| 1517228 | 4187 | 4206 | N/A | N/A | ATGCATTAGAAACCTCTAAC | 92 | 1697 |
| 1517231 | 3198 | 3217 | N/A | N/A | CATTTTAAAGTTCTCCAATC | 78 | 1698 |
| 1517237 | 5079 | 5098 | N/A | N/A | CCAGGAGTCAGAAATGGGAA | 74† | 1699 |
| 1517241 | 3650 | 3669 | N/A | N/A | ACCTGCCAGGAATGTGACCA | 83 | 1700 |
| 1517254 | 6356 | 6375 | 1258 | 1277 | TCTTTATTAAACTAGGGTCC | 31 | 1701 |
| 1517256 | 4822 | 4841 | 304 | 323 | TGGCCGCTCTGCCACTCGGT | 72 | 1702 |
| 1517273 | 2978 | 2997 | N/A | N/A | AGTCCCCTGCTGCTTGCCTC | 92 | 1703 |
| 1517285 | 4177 | 4196 | N/A | N/A | AACCTCTAACTCCCAGCCAG | 78 | 1704 |
| 1517292 | 3269 | 3288 | N/A | N/A | TCTCCCTTCACATTCTAAGC | 102 | 1705 |
| 1517296 | 5035 | 5054 | N/A | N/A | CCAGGCCCCCCAAGACTTAG | 91† | 1706 |
| 1517320 | 2887 | 2906 | 139 | 158 | CCAGGGTCCCAGCTCTTTCT | 95 | 1707 |
| 1517326 | 4894 | 4913 | 376 | 395 | TGCACCTGCTCAGACAGTGT | 49† | 1708 |
| 1517331 | 4786 | 4805 | 268 | 287 | GGCTCCGGCTCTGTCTCCAC | 67 | 1709 |
| 1517351 | 2993 | 3012 | N/A | N/A | GCCCTTCCCAGGTCCAGTCC | 79 | 1710 |
| 1517355 | 3210 | 3229 | N/A | N/A | TAATTCAGTCCTCATTTTAA | 88 | 1711 |
| 1517360 | 5047 | 5066 | N/A | N/A | ACCAGCAGAGACCCAGGCCC | 100† | 1712 |
| 1517377 | 6296 | 6315 | 1198 | 1217 | TGCAGGCTGCGCGGAGGCAG | 35 | 1713 |
| 1517397 | 3554 | 3573 | N/A | N/A | GCCAGTGAGGACTCCTCCCA | 98 | 1714 |
| 1517419 | 6139 | 6158 | 1041 | 1060 | CCACCAGGGGCTCGAACCAG | 84 | 1715 |
| 1517420 | 4584 | 4603 | N/A | N/A | GTATTTATAAACAGGGTCTT | 87 | 1716 |
| 1517427 | 6363 | 6382 | 1265 | 1284 | TGGTGAATCTTTATTAAACT | 20 | 1193 |
| 1517465 | 6326 | 6345 | 1228 | 1247 | GACGGCTGGGGCGGGGACAG | 89 | 1717 |
| 1517466 | 3414 | 3433 | N/A | N/A | ACTCCCTCCTGGTCTTCTCT | 106 | 1718 |
| 1517470 | 3670 | 3689 | N/A | N/A | CGAGCAAGCCCCGCCCCCAT | 113 | 1719 |
| 1517476 | 6159 | 6178 | 1061 | 1080 | CCACTGGCGCTGCATGTCTT | 69 | 1720 |
| 1517509 | 4245 | 4264 | N/A | N/A | GGTGATGGAGAATAAAGATC | 93 | 1721 |
| 1517515 | 6219 | 6238 | 1121 | 1140 | GCTGGGCACAGGGGCGGCGC | 100 | 1722 |
| 1517527 | 3053 | 3072 | N/A | N/A | CCCAGTCCAGCTGCTCTCCC | 97 | 1723 |
| 1517530 | 3459 | 3478 | N/A | N/A | ATCCCAGCACATTTACCAAG | 90 | 1724 |
| 1517544 | 3361 | 3380 | N/A | N/A | AATTCCATCTTCCTCTCCCG | 98 | 1725 |
| 1517565 | 6276 | 6295 | 1178 | 1197 | GAGGCACGGGGTGGCGTGGG | 57 | 1726 |
| 1517572 | 3258 | 3277 | N/A | N/A | ATTCTAAGCTCCAACCTCAC | 84 | 1727 |
| 1517579 | 4716 | 4735 | N/A | N/A | GTCAGGGTCCTTCTGACCCC | 117 | 1728 |
| 1517589 | 3322 | 3341 | N/A | N/A | CCACCCCCTCCCCACCGCCG | 95 | 1729 |
| 1517594 | 3778 | 3797 | N/A | N/A | TTCAGAGCCAGGAAGCAGCA | 100 | 1730 |
| 1517633 | 6246 | 6265 | 1148 | 1167 | TGCAGGCTTCGGCGTTCAGT | 67 | 1731 |
| 1517634 | 6316 | 6335 | 1218 | 1237 | GCGGGGACAGGGTCTCCCGC | 105 | 1732 |
| 1517664 | 4228 | 4247 | N/A | N/A | ATCACAGCTGCCCCGTGTCT | 99 | 1733 |
| 1517681 | 3605 | 3624 | 179 | 198 | CTTCCTGCCTGTGATTGGCC | 79 | 1734 |
| 1517686 | 6346 | 6365 | 1248 | 1267 | ACTAGGGTCCACCCCAGGAG | 60 | 1735 |
| 1517694 | 2854 | 2873 | 106 | 125 | CTCATCCCCGTGCCCCCGAC | 84 | 1736 |
| 1517695 | 3390 | 3409 | N/A | N/A | TCCCCATCCCCAGGTCGGCC | 100 | 1737 |
| 1517704 | 2925 | 2944 | N/A | N/A | GAGTAGCTCTCCTGAGACTA | 89 | 1738 |
| 1517735 | 3156 | 3175 | N/A | N/A | GCCCCTGGCTCCCCAGTTAT | 91 | 1739 |
| 1517741 | 2869 | 2888 | 121 | 140 | CTAGAGGCCCCTGAGCTCAT | 84 | 1740 |
| 1517781 | 3530 | 3549 | N/A | N/A | CAGCCCGGCCCCAACCCGGC | 108 | 1741 |
| 1517792 | 4197 | 4216 | N/A | N/A | TCTGCCTGCAATGCATTAGA | 94 | 1742 |
| 1517794 | 4772 | 4791 | 254 | 273 | CTCCACCGCTTGCTCCACCT | 75 | 1743 |
| 1517797 | 6266 | 6285 | 1168 | 1187 | GTGGCGTGGGGTCGCATGGC | 47 | 1744 |
| 1517800 | 4656 | 4675 | N/A | N/A | CACAAATGCTTCTTTGGAGC | 96 | 1745 |
| 1517806 | 6306 | 6325 | 1208 | 1227 | GGTCTCCCGCTGCAGGCTGC | 41 | 1746 |
| 1517809 | 3300 | 3319 | N/A | N/A | TCCATCTCAGTCCCAGTCTC | 99 | 1747 |
| 1517824 | 3371 | 3390 | N/A | N/A | CTCCATAGAAAATTCCATCT | 75 | 1748 |
| 1517830 | 3843 | 3862 | N/A | N/A | AAACAACTTCTAACTCCTAT | 94 | 1749 |
| 1517845 | 3224 | 3243 | N/A | N/A | TTCCATTTATGAGCTAATTC | 91 | 1750 |
| 1517855 | 3034 | 3053 | N/A | N/A | CCACCCCACCTTCTAGCGGG | 88 | 1751 |
| 1517864 | 3437 | 3456 | N/A | N/A | GCCCCCAACCCATTCCCTAT | 91 | 1752 |
| 1517868 | 3427 | 3446 | N/A | N/A | CATTCCCTATTTAACTCCCT | 98 | 1753 |
| 1517876 | 2952 | 2971 | N/A | N/A | GCTCCTCCTCTCCCCAAGCC | 65 | 1754 |
| 1517880 | 6336 | 6355 | 1238 | 1257 | ACCCCAGGAGGACGGCTGGG | 94 | 72 |
| 1517888 | 3469 | 3488 | N/A | N/A | CAACAGCCTAATCCCAGCAC | 84 | 1755 |
| 1517895 | 6179 | 6198 | 1081 | 1100 | ACCTTCTCCACCAGCCCGGC | 78 | 1756 |

TABLE 29
Reduction of APOE RNA by 5-10-5 MOE gapmers with mixed PO/PS internucleoside linkages
at a concentration of 4000 nM in Hep3B cells plated at 20,000 cells per well

| | SEQ ID | SEQ ID | SEQ ID | SEQ ID | | | |
|---|---|---|---|---|---|---|---|
| | No: 1 | No: 1 | No: 2 | No: 2 | | APOE | |
| Compound | Start | Stop | Start | Stop | | (% | SEQ ID |
| Number | Site | Site | Site | Site | Sequence (5′ to 3′) | UTC) | NO |
| 942587 | 6255 | 6274 | 1157 | 1176 | TCGCATGGCTGCAGGCTTCG | 30 | 1061 |
| 942591 | 6305 | 6324 | 1207 | 1226 | GTCTCCCGCTGCAGGCTGCG | 48 | 990 |
| 1517143 | 6335 | 6354 | 1237 | 1256 | CCCCAGGAGGACGGCTGGGG | 87 | 1757 |
| 1517161 | 4196 | 4215 | N/A | N/A | CTGCCTGCAATGCATTAGAA | 81 | 1758 |
| 1517163 | 2867 | 2886 | 119 | 138 | AGAGGCCCCTGAGCTCATCC | 97 | 1759 |
| 1517177 | 6235 | 6254 | 1137 | 1156 | GCGTTCAGTGATTGTCGCTG | 63 | 1760 |
| 1517196 | 3553 | 3572 | N/A | N/A | CCAGTGAGGACTCCTCCCAC | 83 | 1761 |
| 1517214 | 4244 | 4263 | N/A | N/A | GTGATGGAGAATAAAGATCA | 81 | 1762 |
| 1517219 | 3257 | 3276 | N/A | N/A | TTCTAAGCTCCAACCTCACA | 87 | 1763 |
| 1517233 | 4186 | 4205 | N/A | N/A | TGCATTAGAAACCTCTAACT | 85 | 1764 |
| 1517239 | 2974 | 2993 | N/A | N/A | CCCTGCTGCTTGCCTCACCC | 81 | 1765 |
| 1517242 | 3052 | 3071 | N/A | N/A | CCAGTCCAGCTGCTCTCCCC | 85 | 1766 |
| 1517244 | 2950 | 2969 | N/A | N/A | TCCTCCTCTCCCCAAGCCCG | 99 | 1767 |
| 1517247 | 3529 | 3548 | N/A | N/A | AGCCCGGCCCCAACCCGGCC | 101 | 1768 |
| 1517251 | 3660 | 3679 | N/A | N/A | CCGCCCCCATACCTGCCAGG | 92 | 1769 |
| 1517258 | 3632 | 3651 | 206 | 225 | CAGCAACGCAGCCCACAGAA | 86 | 1770 |
| 1517262 | 3436 | 3455 | N/A | N/A | CCCCCAACCCATTCCCTATT | 124 | 1771 |
| 1517266 | 2849 | 2868 | 101 | 120 | CCCCGTGCCCCCGACTGCGC | 96 | 1772 |
| 1517305 | 3426 | 3445 | N/A | N/A | ATTCCCTATTTAACTCCCTC | 86 | 1773 |
| 1517310 | 4597 | 4616 | N/A | N/A | TGGAAAGCATTATGTATTTA | 85 | 1774 |
| 1517321 | 3669 | 3688 | N/A | N/A | GAGCAAGCCCCGCCCCCATA | 79 | 1775 |
| 1517324 | 3499 | 3518 | N/A | N/A | TTAGCCTTCCAAGCCTTGTT | 87 | 1776 |
| 1517335 | 4911 | 4930 | 393 | 412 | AGCTGAGCAGCTCCTCCTGC | 30† | 1777 |
| 1517342 | 4175 | 4194 | N/A | N/A | CCTCTAACTCCCAGCCAGGT | 103 | 1778 |
| 1517352 | 4713 | 4732 | N/A | N/A | AGGGTCCTTCTGACCCCGTC | 90 | 1779 |
| 1517354 | 6325 | 6344 | 1227 | 1246 | ACGGCTGGGGCGGGGACAGG | 108 | 1780 |
| 1517357 | 3298 | 3317 | N/A | N/A | CATCTCAGTCCCAGTCTCGC | 82 | 1781 |
| 1517366 | 3468 | 3487 | N/A | N/A | AACAGCCTAATCCCAGCACA | 78 | 1782 |
| 1517373 | 3517 | 3536 | N/A | N/A | ACCCGGCCTCACCCCAGGTT | 97 | 1783 |
| 1517380 | 6345 | 6364 | 1247 | 1266 | CTAGGGTCCACCCCAGGAGG | 71 | 1784 |
| 1517395 | 4655 | 4674 | N/A | N/A | ACAAATGCTTCTTTGGAGCC | 93 | 1785 |
| 1517399 | 2924 | 2943 | N/A | N/A | AGTAGCTCTCCTGAGACTAC | 106 | 1786 |
| 1517402 | 3360 | 3379 | N/A | N/A | ATTCCATCTTCCTCTCCCGG | 74 | 1787 |
| 1517405 | 3480 | 3499 | N/A | N/A | TGCATTATCTGCAACAGCCT | 80 | 1788 |
| 1517418 | 3321 | 3340 | N/A | N/A | CACCCCCTCCCCACCGCCGG | 130 | 1789 |
| 1517422 | 2964 | 2983 | N/A | N/A | TGCCTCACCCCCGCTCCTCC | 110 | 1790 |
| 1517427 | 6363 | 6382 | 1265 | 1284 | TGGTGAATCTTTATTAAACT | 26 | 1193 |
| 1517442 | 5060 | 5079 | N/A | N/A | AGAGGAAGCTAGAACCAGCA | 81† | 1791 |
| 1517445 | 6355 | 6374 | 1257 | 1276 | CTTTATTAAACTAGGGTCCA | 30 | 1792 |
| 1517446 | 6137 | 6156 | 1039 | 1058 | ACCAGGGGCTCGAACCAGCT | 76 | 1793 |
| 1517469 | 3008 | 3027 | N/A | N/A | CGTCTCTGCTGCCCAGCCCT | 95 | 1794 |
| 1517484 | 5034 | 5053 | N/A | N/A | CAGGCCCCCCAAGACTTAGC | 102† | 1795 |
| 1517505 | 4785 | 4804 | 267 | 286 | GCTCCGGCTCTGTCTCCACC | 66 | 1796 |
| 1517516 | 6197 | 6216 | 1099 | 1118 | GTGCCCACGGCAGCCTGCAC | 78 | 67 |
| 1517526 | 4821 | 4840 | 303 | 322 | GGCCGCTCTGCCACTCGGTC | 102 | 1797 |
| 1517532 | 6265 | 6284 | 1167 | 1186 | TGGCGTGGGGTCGCATGGCT | 27 | 1798 |
| 1517562 | 3153 | 3172 | N/A | N/A | CCTGGCTCCCCAGTTATGGA | 107 | 1799 |
| 1517563 | 6315 | 6334 | 1217 | 1236 | CGGGGACAGGGTCTCCCGCT | 92 | 1800 |
| 1517571 | 3066 | 3085 | N/A | N/A | CTATGGCTTACATCCCAGTC | 77 | 1801 |
| 1517582 | 3285 | 3304 | N/A | N/A | GTCTCGCATTCCTCATTCTC | 80 | 1802 |
| 1517598 | 4542 | 4561 | N/A | N/A | GCAGCGGCCTGAACATGGTT | 107 | 1803 |
| 1517615 | 6157 | 6176 | 1059 | 1078 | ACTGGCGCTGCATGTCTTCC | 74 | 1804 |
| 1517630 | 3370 | 3389 | N/A | N/A | TCCATAGAAAATTCCATCTT | 77 | 1805 |
| 1517635 | 3402 | 3421 | N/A | N/A | TCTTCTCTTATCTCCCCATC | 86 | 1806 |
| 1517642 | 3777 | 3796 | N/A | N/A | TCAGAGCCAGGAAGCAGCAC | 111 | 1807 |
| 1517644 | 3223 | 3242 | N/A | N/A | TCCATTTATGAGCTAATTCA | 69 | 1808 |
| 1517655 | 5046 | 5065 | N/A | N/A | CCAGCAGAGACCCAGGCCCC | 87† | 1809 |
| 1517662 | 3619 | 3638 | 193 | 212 | CACAGAACCTTCATCTTCCT | 74 | 1810 |
| 1517665 | 6275 | 6294 | 1177 | 1196 | AGGCACGGGGTGGCGTGGGG | 77 | 1811 |
| 1517666 | 2886 | 2905 | 138 | 157 | CAGGGTCCCAGCTCTTTCTA | 82 | 1812 |
| 1517669 | 6177 | 6196 | 1079 | 1098 | CTTCTCCACCAGCCCGGCCC | 92 | 1813 |
| 1517670 | 3209 | 3228 | N/A | N/A | AATTCAGTCCTCATTTTAAA | 89 | 1814 |
| 1517718 | 3268 | 3287 | N/A | N/A | CTCCCTTCACATTCTAAGCT | 93 | 1815 |
| 1517733 | 3196 | 3215 | N/A | N/A | TTTTAAAGTTCTCCAATCGA | 71 | 1816 |
| 1517734 | 3842 | 3861 | N/A | N/A | AACAACTTCTAACTCCTATC | 73 | 1817 |
| 1517757 | 3412 | 3431 | N/A | N/A | TCCCTCCTGGTCTTCTCTTA | 82 | 1818 |
| 1517774 | 4214 | 4233 | N/A | N/A | GTGTCTGGTATTCACTATCT | 96 | 1819 |
| 1517786 | 3604 | 3623 | 178 | 197 | TTCCTGCCTGTGATTGGCCA | 73 | 1820 |
| 1517787 | 4893 | 4912 | 375 | 394 | GCACCTGCTCAGACAGTGTC | 52† | 37 |
| 1517813 | 6285 | 6304 | 1187 | 1206 | CGGAGGCAGGAGGCACGGGG | 95 | 1821 |
| 1517825 | 6217 | 6236 | 1119 | 1138 | TGGGCACAGGGGCGGCGCTG | 91 | 1822 |
| 1517827 | 4771 | 4790 | 253 | 272 | TCCACCGCTTGCTCCACCTT | 86 | 1823 |
| 1517848 | 6245 | 6264 | 1147 | 1166 | GCAGGCTTCGGCGTTCAGTG | 50 | 1824 |
| 1517871 | 6295 | 6314 | 1197 | 1216 | GCAGGCTGCGCGGAGGCAGG | 45 | 1825 |
| 1517873 | 3389 | 3408 | N/A | N/A | CCCCATCCCCAGGTCGGCCT | 95 | 1826 |
| 1517891 | 6366 | 6385 | 1268 | 1287 | ACTTGGTGAATCTTTATTAA | 32 | 1827 |
| 1517906 | 2992 | 3011 | N/A | N/A | CCCTTCCCAGGTCCAGTCCC | 96 | 1828 |
| 1517908 | 3458 | 3477 | N/A | N/A | TCCCAGCACATTTACCAAGC | 87 | 1829 |

TABLE 30
Reduction of APOE RNA by 5-10-5 MOE gapmers with mixed PO/PS internucleoside linkages
at a concentration of 4000 nM in Hep3B cells plated at 20,000 cells per well

| | SEQ ID | SEQ ID | SEQ ID | SEQ ID | | | |
|---|---|---|---|---|---|---|---|
| | No: 1 | No: 1 | No: 2 | No: 2 | | APOE | |
| Compound | Start | Stop | Start | Stop | | (% | SEQ ID |
| Number | Site | Site | Site | Site | Sequence (5′ to 3′) | UTC) | NO |
| 708021 | 6254 | 6273 | 1156 | 1175 | CGCATGGCTGCAGGCTTCGG | 19 | 70 |
| 708027 | 6234 | 6253 | 1136 | 1155 | CGTTCAGTGATTGTCGCTGG | 58 | 69 |
| 1517151 | 3479 | 3498 | N/A | N/A | GCATTATCTGCAACAGCCTA | 90 | 1830 |
| 1517152 | 3388 | 3407 | N/A | N/A | CCCATCCCCAGGTCGGCCTC | 109 | 1831 |
| 1517165 | 3284 | 3303 | N/A | N/A | TCTCGCATTCCTCATTCTCC | 78 | 1832 |
| 1517174 | 2963 | 2982 | N/A | N/A | GCCTCACCCCCGCTCCTCCT | 90 | 1833 |
| 1517179 | 5058 | 5077 | N/A | N/A | AGGAAGCTAGAACCAGCAGA | 98† | 1834 |
| 1517188 | 6344 | 6363 | 1246 | 1265 | TAGGGTCCACCCCAGGAGGA | 93 | 1835 |
| 1517195 | 4195 | 4214 | N/A | N/A | TGCCTGCAATGCATTAGAAA | 96 | 1836 |
| 1517209 | 6195 | 6214 | 1097 | 1116 | GCCCACGGCAGCCTGCACCT | 104 | 1837 |
| 1517211 | 4820 | 4839 | 302 | 321 | GCCGCTCTGCCACTCGGTCT | 93 | 1838 |
| 1517222 | 3064 | 3083 | N/A | N/A | ATGGCTTACATCCCAGTCCA | 93 | 1839 |
| 1517248 | 4767 | 4786 | 249 | 268 | CCGCTTGCTCCACCTTGGCC | 88 | 1840 |
| 1517264 | 3552 | 3571 | N/A | N/A | CAGTGAGGACTCCTCCCACC | 100 | 1841 |
| 1517278 | 2866 | 2885 | 118 | 137 | GAGGCCCCTGAGCTCATCCC | 93 | 1842 |
| 1517286 | 3359 | 3378 | N/A | N/A | TTCCATCTTCCTCTCCCGGG | 80 | 1843 |
| 1517295 | 6244 | 6263 | 1146 | 1165 | CAGGCTTCGGCGTTCAGTGA | 62 | 1844 |
| 1517297 | 2884 | 2903 | 136 | 155 | GGGTCCCAGCTCTTTCTAGA | 109 | 1845 |
| 1517298 | 4708 | 4727 | N/A | N/A | CCTTCTGACCCCGTCCAGGC | 92 | 1846 |
| 1517300 | 3399 | 3418 | N/A | N/A | TCTCTTATCTCCCCATCCCC | 85 | 1847 |
| 1517327 | 3496 | 3515 | N/A | N/A | GCCTTCCAAGCCTTGTTGCA | 89 | 1848 |
| 1517350 | 3841 | 3860 | N/A | N/A | ACAACTTCTAACTCCTATCT | 87 | 1849 |
| 1517353 | 3411 | 3430 | N/A | N/A | CCCTCCTGGTCTTCTCTTAT | 94 | 1850 |
| 1517361 | 6294 | 6313 | 1196 | 1215 | CAGGCTGCGCGGAGGCAGGA | 54 | 1851 |
| 1517362 | 4783 | 4802 | 265 | 284 | TCCGGCTCTGTCTCCACCGC | 81 | 1852 |
| 1517369 | 3320 | 3339 | N/A | N/A | ACCCCCTCCCCACCGCCGGT | 89 | 1853 |
| 1517385 | 4910 | 4929 | 392 | 411 | GCTGAGCAGCTCCTCCTGCA | 37† | 1854 |
| 1517391 | 3207 | 3226 | N/A | N/A | TTCAGTCCTCATTTTAAAGT | 82 | 1855 |
| 1517393 | 6274 | 6293 | 1176 | 1195 | GGCACGGGGTGGCGTGGGGT | 73 | 1856 |
| 1517414 | 6175 | 6194 | 1077 | 1096 | TCTCCACCAGCCCGGCCCAC | 116 | 1857 |
| 1517423 | 3194 | 3213 | N/A | N/A | TTAAAGTTCTCCAATCGACG | 77 | 1858 |
| 1517427 | 6363 | 6382 | 1265 | 1284 | TGGTGAATCTTTATTAAACT | 24 | 1193 |
| 1517435 | 3267 | 3286 | N/A | N/A | TCCCTTCACATTCTAAGCTC | 99 | 1859 |
| 1517479 | 3425 | 3444 | N/A | N/A | TTCCCTATTTAACTCCCTCC | 86 | 1860 |
| 1517481 | 2949 | 2968 | N/A | N/A | CCTCCTCTCCCCAAGCCCGA | 87 | 1861 |
| 1517514 | 3770 | 3789 | N/A | N/A | CAGGAAGCAGCACAGAAGCC | 86 | 1862 |
| 1517521 | 2835 | 2854 | 87 | 106 | CTGCGCTTCTCACCGGCTCC | 109 | 1863 |
| 1517524 | 3668 | 3687 | N/A | N/A | AGCAAGCCCCGCCCCCATAC | 86 | 1864 |
| 1517525 | 3255 | 3274 | N/A | N/A | CTAAGCTCCAACCTCACAGT | 101 | 1865 |
| 1517533 | 4892 | 4911 | 374 | 393 | CACCTGCTCAGACAGTGTCT | 49† | 1866 |
| 1517543 | 3631 | 3650 | 205 | 224 | AGCAACGCAGCCCACAGAAC | 79 | 1867 |
| 1517545 | 6324 | 6343 | 1226 | 1245 | CGGCTGGGGCGGGGACAGGG | 86 | 1868 |
| 1517573 | 4185 | 4204 | N/A | N/A | GCATTAGAAACCTCTAACTC | 93 | 1869 |
| 1517578 | 6365 | 6384 | 1267 | 1286 | CTTGGTGAATCTTTATTAAA | 28 | 1870 |
| 1517584 | 5028 | 5047 | N/A | N/A | CCCCAAGACTTAGCGACAGG | 85† | 1871 |
| 1517588 | 3435 | 3454 | N/A | N/A | CCCCAACCCATTCCCTATTT | 88 | 1872 |
| 1517595 | 6135 | 6154 | 1037 | 1056 | CAGGGGCTCGAACCAGCTCT | 96 | 1873 |
| 1517609 | 3220 | 3239 | N/A | N/A | ATTTATGAGCTAATTCAGTC | 103 | 1874 |
| 1517613 | 3051 | 3070 | N/A | N/A | CAGTCCAGCTGCTCTCCCCA | 86 | 1875 |
| 1517625 | 6314 | 6333 | 1216 | 1235 | GGGGACAGGGTCTCCCGCTG | 79 | 1876 |
| 1517637 | 4595 | 4614 | N/A | N/A | GAAAGCATTATGTATTTATA | 88 | 1877 |
| 1517659 | 3006 | 3025 | N/A | N/A | TCTCTGCTGCCCAGCCCTTC | 100 | 1878 |
| 1517667 | 6304 | 6323 | 1206 | 1225 | TCTCCCGCTGCAGGCTGCGC | 52 | 1879 |
| 1517675 | 2991 | 3010 | N/A | N/A | CCTTCCCAGGTCCAGTCCCC | 92 | 1880 |
| 1517685 | 3659 | 3678 | N/A | N/A | CGCCCCCATACCTGCCAGGA | 99 | 1881 |
| 1517691 | 4173 | 4192 | N/A | N/A | TCTAACTCCCAGCCAGGTGC | 90 | 1882 |
| 1517696 | 6334 | 6353 | 1236 | 1255 | CCCAGGAGGACGGCTGGGGC | 105 | 1883 |
| 1517719 | 2973 | 2992 | N/A | N/A | CCTGCTGCTTGCCTCACCCC | 75 | 1884 |
| 1517722 | 6264 | 6283 | 1166 | 1185 | GGCGTGGGGTCGCATGGCTG | 41 | 1885 |
| 1517724 | 6354 | 6373 | 1256 | 1275 | TTTATTAAACTAGGGTCCAC | 56 | 1886 |
| 1517731 | 3574 | 3593 | N/A | N/A | GGAGAAACTGTCAATCAACC | 90 | 1887 |
| 1517737 | 6155 | 6174 | 1057 | 1076 | TGGCGCTGCATGTCTTCCAC | 68 | 1888 |
| 1517758 | 3457 | 3476 | N/A | N/A | CCCAGCACATTTACCAAGCC | 80 | 1889 |
| 1517759 | 3528 | 3547 | N/A | N/A | GCCCGGCCCCAACCCGGCCT | 96 | 1890 |
| 1517761 | 4541 | 4560 | N/A | N/A | CAGCGGCCTGAACATGGTTC | 92 | 1891 |
| 1517771 | 4653 | 4672 | N/A | N/A | AAATGCTTCTTTGGAGCCAT | 88 | 1892 |
| 1517779 | 2922 | 2941 | N/A | N/A | TAGCTCTCCTGAGACTACCT | 89 | 1893 |
| 1517782 | 6215 | 6234 | 1117 | 1136 | GGCACAGGGGCGGCGCTGGT | 93 | 1894 |
| 1517783 | 3369 | 3388 | N/A | N/A | CCATAGAAAATTCCATCTTC | 92 | 1895 |
| 1517798 | 3516 | 3535 | N/A | N/A | CCCGGCCTCACCCCAGGTTA | 118 | 1896 |
| 1517811 | 3297 | 3316 | N/A | N/A | ATCTCAGTCCCAGTCTCGCA | 82 | 1897 |
| 1517816 | 3150 | 3169 | N/A | N/A | GGCTCCCCAGTTATGGAGAT | 93 | 1898 |
| 1517820 | 4211 | 4230 | N/A | N/A | TCTGGTATTCACTATCTGCC | 79 | 1899 |
| 1517829 | 6284 | 6303 | 1186 | 1205 | GGAGGCAGGAGGCACGGGGT | 81 | 1900 |
| 1517859 | 5045 | 5064 | N/A | N/A | CAGCAGAGACCCAGGCCCCC | 100† | 1901 |
| 1517872 | 3467 | 3486 | N/A | N/A | ACAGCCTAATCCCAGCACAT | 83 | 1902 |
| 1517879 | 3618 | 3637 | 192 | 211 | ACAGAACCTTCATCTTCCTG | 84 | 1903 |
| 1517881 | 4243 | 4262 | N/A | N/A | TGATGGAGAATAAAGATCAC | 100 | 1904 |

### Example 4: Effect of 3-10-3 cEt Mixed Backbone Modified Oligonucleotides on Human APOE RNA In Vitro, Single Dose

[0710] Modified oligonucleotides complementary to human APOE nucleic acid were designed and tested for their single dose effects on APOE RNA in vitro. The modified oligonucleotides were tested in a series of experiments that had the same culture conditions.

[0711] The modified oligonucleotides in the tables below are 3-10-3 cEt gapmers with mixed PO/PS internucleoside linkages. The gapmers are 16 nucleosides in length, wherein the central gap segment consists often 2′-β-D-deoxynucleosides, and wherein the 5′ and 3′ wing segments each consist of three cEt modified nucleosides. The sugar motif for the gapmers is (from 5′ to 3′): kkkddddddddddkkk; wherein each ‘d’ represents a 2′-β-D-deoxyribosyl sugar moiety, and each ‘k’ represents a cEt sugar moiety. The internucleoside linkage motif for the gapmers is (from 5′ to 3′): soossssssssssos; wherein each ‘o’ represents a phosphodiester internucleoside linkage and each ‘s’ represents a phosphorothioate internucleoside linkage. Each cytosine residue is a 5-methyl cytosine.

[0712] “Start site” indicates the 5′-most nucleoside to which the modified oligonucleotide is complementary in the target nucleic acid sequence. “Stop site” indicates the 3′-most nucleoside to which the modified oligonucleotide is complementary in the target nucleic acid sequence. Each modified oligonucleotide listed in the tables below is 100% complementary to SEQ ID NO: 1 (described herein above), to SEQ ID NO: 2 (described herein above), or to both. ‘N/A’ indicates that the modified oligonucleotide is not 100% complementary to that particular target nucleic acid sequence.

[0713] Cultured Hep3B cells were treated with modified oligonucleotide at a concentration of 4000 nM by electroporation at a density of 20,000 cells per well. After a treatment period of approximately 24 hours, total RNA was isolated from the cells and APOE RNA levels were measured by quantitative real-time RTPCR. APOE RNA levels were measured by human primer-probe set RTS3073 (described herein in Example 1). APOE RNA levels were normalized to total RNA content, as measured by RIBOGREEN®. Results are presented in the tables below as percent APOE RNA relative to untreated control cells (% UTC). Each table represents results from an individual assay plate. The values marked with an “†” indicate that the modified oligonucleotide is complementary to the amplicon region of the primer probe set. Additional assays may be used to measure the potency and efficacy of the modified oligonucleotides complementary to the amplicon region.

TABLE 31
Reduction of APOE RNA by 3-10-3 cEt gapmers with mixed PO/PS internucleoside linkages
at a concentration of 4000 nM in Hep3B cells plated at 20,000 cells per well

| | SEQ ID | SEQ ID | SEQ ID | SEQ ID | | | |
|---|---|---|---|---|---|---|---|
| | No: 1 | No: 1 | No: 2 | No: 2 | | APOE | |
| Compound | Start | Stop | Start | Stop | | (% | SEQ ID |
| Number | Site | Site | Site | Site | Sequence (5′ to 3′) | UTC) | NO |
| 1335585 | 4190 | 4205 | N/A | N/A | TGCATTAGAAACCTCT | 76 | 1905 |
| 1335661 | 6353 | 6368 | 1255 | 1270 | TAAACTAGGGTCCACC | 13 | 1906 |
| 1516543 | 6329 | 6344 | 1231 | 1246 | ACGGCTGGGGCGGGGA | 70 | 1907 |
| 1516550 | 5064 | 5079 | N/A | N/A | AGAGGAAGCTAGAACC | 89† | 1908 |
| 1516555 | 6265 | 6280 | 1167 | 1182 | GTGGGGTCGCATGGCT | 15 | 1909 |
| 1516556 | 6132 | 6147 | 1034 | 1049 | TCGAACCAGCTCTTGA | 72 | 1910 |
| 1516597 | 3340 | 3355 | N/A | N/A | CAAATTCCATCCCCCC | 60 | 1911 |
| 1516600 | 5910 | 5925 | 812 | 827 | GCCCGCACGCGGCCCT | 63 | 1912 |
| 1516604 | 2853 | 2868 | 105 | 120 | CCCCGTGCCCCCGACT | 106 | 1913 |
| 1516614 | 6313 | 6328 | 1215 | 1230 | CAGGGTCTCCCGCTGC | 37 | 1914 |
| 1516625 | 6249 | 6264 | 1151 | 1166 | GCAGGCTTCGGCGTTC | 33 | 1915 |
| 1516649 | 6289 | 6304 | 1191 | 1206 | CGGAGGCAGGAGGCAC | 74 | 1916 |
| 1516653 | 3656 | 3671 | N/A | N/A | ATACCTGCCAGGAATG | 104 | 1917 |
| 1516654 | 5036 | 5051 | N/A | N/A | GGCCCCCCAAGACTTA | 102† | 1918 |
| 1516660 | 2939 | 2954 | N/A | N/A | GCCCGACCCCGAGTAG | 143 | 1919 |
| 1516663 | 2915 | 2930 | N/A | N/A | AGACTACCTGGAGGCC | 81 | 1920 |
| 1516672 | 6361 | 6376 | 1263 | 1278 | ATCTTTATTAAACTAG | 13 | 1921 |
| 1516678 | 5718 | 5733 | 620 | 635 | TGGCCGAGCATGGCCT | 98 | 1922 |
| 1516687 | 4616 | 4631 | N/A | N/A | GTCGGTTTAATCACTT | 71 | 1923 |
| 1516693 | 2874 | 2889 | 126 | 141 | TCTAGAGGCCCCTGAG | 104 | 1924 |
| 1516728 | 4706 | 4721 | N/A | N/A | GACCCCGTCCAGGCAT | 85 | 1925 |
| 1516731 | 3253 | 3268 | N/A | N/A | TCCAACCTCACAGTTA | 79 | 1926 |
| 1516735 | 5770 | 5785 | 672 | 687 | ACGCAGCTTGCGCAGG | 57 | 1927 |
| 1516740 | 6378 | 6393 | 1280 | 1295 | TGCGTGAAACTTGGTG | 24 | 1928 |
| 1516747 | 3505 | 3520 | N/A | N/A | GGTTAGCCTTCCAAGC | 71 | 1929 |
| 1516781 | 3431 | 3446 | N/A | N/A | CATTCCCTATTTAACT | 86 | 1930 |
| 1516800 | 5857 | 5872 | 759 | 774 | GAGGCCGCGCTCGGCG | 88 | 1931 |
| 1516806 | 4540 | 4555 | N/A | N/A | GCCTGAACATGGTTCA | 83 | 1932 |
| 1516808 | 6273 | 6288 | 1175 | 1190 | GGGGTGGCGTGGGGTC | 66 | 1933 |
| 1516818 | 3452 | 3467 | N/A | N/A | TTTACCAAGCCGCCCC | 95 | 1934 |
| 1516825 | 3833 | 3848 | N/A | N/A | TCCTATCTCAAGGATG | 97 | 1935 |
| 1516836 | 4231 | 4246 | N/A | N/A | TCACAGCTGCCCCGTG | 82 | 1936 |
| 1516838 | 5195 | 5210 | N/A | N/A | ATATAAAAGAGCTAGG | 87† | 1937 |
| 1516862 | 6257 | 6272 | 1159 | 1174 | GCATGGCTGCAGGCTT | 10 | 1938 |
| 1516863 | 2931 | 2946 | N/A | N/A | CCGAGTAGCTCTCCTG | 90 | 1939 |
| 1516864 | 5785 | 5800 | 687 | 702 | GCGGAGGAGCCGCTTA | 86 | 1940 |
| 1516873 | 5957 | 5972 | 859 | 874 | GGGCCCGCTCCTGTAG | 89 | 1941 |
| 1516893 | 3573 | 3588 | N/A | N/A | AACTGTCAATCAACCG | 84 | 1942 |
| 1516899 | 3522 | 3537 | N/A | N/A | AACCCGGCCTCACCCC | 94 | 1943 |
| 1516902 | 3073 | 3088 | N/A | N/A | CTGCTATGGCTTACAT | 71 | 1944 |
| 1516903 | 3153 | 3168 | N/A | N/A | GCTCCCCAGTTATGGA | 106 | 1945 |
| 1516911 | 6345 | 6360 | 1247 | 1262 | GGTCCACCCCAGGAGG | 61 | 1946 |
| 1516912 | 3419 | 3434 | N/A | N/A | AACTCCCTCCTGGTCT | 81 | 1947 |
| 1516914 | 3311 | 3326 | N/A | N/A | CGCCGGTTCCATCTCA | 82 | 1948 |
| 1516923 | 2948 | 2963 | N/A | N/A | TCTCCCCAAGCCCGAC | 107 | 1949 |
| 1516932 | 6370 | 6385 | 1272 | 1287 | ACTTGGTGAATCTTTA | 23 | 1950 |
| 1516933 | 3791 | 3806 | N/A | N/A | AAATCGCTGTTCAGAG | 85 | 1951 |
| 1516943 | 6321 | 6336 | 1223 | 1238 | GGCGGGGACAGGGTCT | 42 | 1952 |
| 1516952 | 3463 | 3478 | N/A | N/A | ATCCCAGCACATTTAC | 57 | 1953 |
| 1516960 | 6281 | 6296 | 1183 | 1198 | GGAGGCACGGGGTGGC | 48 | 1954 |
| 1516973 | 6305 | 6320 | 1207 | 1222 | CCCGCTGCAGGCTGCG | 31 | 1955 |
| 1516975 | 3485 | 3500 | N/A | N/A | TTGCATTATCTGCAAC | 87 | 1956 |
| 1516976 | 4800 | 4815 | 282 | 297 | GCGCAGCTCGGGCTCC | 132 | 1957 |
| 1516979 | 4987 | 5002 | N/A | N/A | AGGTATAGCCGCCCAC | 87† | 1958 |
| 1516988 | 3063 | 3078 | N/A | N/A | TTACATCCCAGTCCAG | 70 | 1959 |
| 1516990 | 4126 | 4141 | N/A | N/A | GGAGATCGAAACGGGC | 85 | 1960 |
| 1517001 | 5645 | 5660 | 547 | 562 | GCCGGGCCTGCGCCGC | 57 | 1961 |
| 1517009 | 5987 | 6002 | 889 | 904 | TCCGCGCGCGCAGCCG | 63 | 1962 |
| 1517015 | 3634 | 3649 | 208 | 223 | GCAACGCAGCCCACAG | 59 | 1963 |
| 1517017 | 5692 | 5707 | 594 | 609 | GCGGTACTGCACCAGG | 75 | 1964 |
| 1517020 | 4978 | 4993 | N/A | N/A | CGCCCACCAGGAGGGT | 87† | 1965 |
| 1517029 | 6233 | 6248 | 1135 | 1150 | AGTGATTGTCGCTGGG | 22 | 1966 |
| 1517037 | 4856 | 4871 | 338 | 353 | CAAAAGCGACCCAGTG | 62† | 1967 |
| 1517052 | 6110 | 6125 | 1012 | 1027 | CCTGGAAGGCCTCGGC | 70 | 1968 |
| 1517066 | 5012 | 5027 | N/A | N/A | GGCAGAATGAAACCTG | 92† | 1969 |
| 1517068 | 3444 | 3459 | N/A | N/A | GCCGCCCCCAACCCAT | 89 | 1970 |
| 1517074 | 5832 | 5847 | 734 | 749 | GCCCCGGCCTGGTACA | 100 | 1971 |
| 1517075 | 5570 | 5585 | 472 | 487 | CCAGTTCCGATTTGTA | 58 | 1972 |
| 1517078 | 3226 | 3241 | N/A | N/A | CCATTTATGAGCTAAT | 70 | 1973 |
| 1517079 | 3184 | 3199 | N/A | N/A | TCGACGGCTAGCTACC | 71 | 1974 |
| 1517081 | 4864 | 4879 | 346 | 361 | GGTAATCCCAAAAGCG | 58† | 1975 |
| 1517101 | 3532 | 3547 | N/A | N/A | GCCCGGCCCCAACCCG | 84 | 1976 |
| 1517104 | 3668 | 3683 | N/A | N/A | AGCCCCGCCCCCATAC | 94 | 1977 |
| 1517105 | 6337 | 6352 | 1239 | 1254 | CCAGGAGGACGGCTGG | 78 | 1978 |
| 1517110 | 3197 | 3212 | N/A | N/A | TAAAGTTCTCCAATCG | 70 | 1979 |
| 1517119 | 6241 | 6256 | 1143 | 1158 | CGGCGTTCAGTGATTG | 39 | 1980 |
| 1517123 | 6297 | 6312 | 1199 | 1214 | AGGCTGCGCGGAGGCA | 15 | 1981 |
| 1517130 | 6365 | 6380 | 1267 | 1282 | GTGAATCTTTATTAAA | 20 | 1982 |

TABLE 32
Reduction of APOE RNA by 3-10-3 cEt gapmers with mixed PO/PS internucleoside linkages
at a concentration of 4000 nM in Hep3B cells plated at 20,000 cells per well

| | SEQ ID | SEQ ID | SEQ ID | SEQ ID | | | |
|---|---|---|---|---|---|---|---|
| | No: 1 | No: 1 | No: 2 | No: 2 | | APOE | |
| Compound | Start | Stop | Start | Stop | | (% | SEQ ID |
| Number | Site | Site | Site | Site | Sequence (5′ to 3′) | UTC) | NO |
| 1335562 | 3196 | 3211 | N/A | N/A | AAAGTTCTCCAATCGA | 65 | 1983 |
| 1335576 | 3428 | 3443 | N/A | N/A | TCCCTATTTAACTCCC | 96 | 1984 |
| 1335671 | 5011 | 5026 | N/A | N/A | GCAGAATGAAACCTGG | 80† | 1985 |
| 1335675 | 4189 | 4204 | N/A | N/A | GCATTAGAAACCTCTA | 83 | 1986 |
| 1335681 | 3846 | 3861 | N/A | N/A | AACAACTTCTAACTCC | 69 | 1987 |
| 1516527 | 4225 | 4240 | N/A | N/A | CTGCCCCGTGTCTGGT | 88 | 1988 |
| 1516528 | 4977 | 4992 | N/A | N/A | GCCCACCAGGAGGGTC | 92† | 1989 |
| 1516532 | 6288 | 6303 | 1190 | 1205 | GGAGGCAGGAGGCACG | 60 | 1990 |
| 1516539 | 6256 | 6271 | 1158 | 1173 | CATGGCTGCAGGCTTC | 14 | 1991 |
| 1516548 | 4855 | 4870 | 337 | 352 | AAAAGCGACCCAGTGC | 61† | 1992 |
| 1516558 | 3310 | 3325 | N/A | N/A | GCCGGTTCCATCTCAG | 76 | 1993 |
| 1516573 | 4986 | 5001 | N/A | N/A | GGTATAGCCGCCCACC | 81† | 1994 |
| 1516578 | 3462 | 3477 | N/A | N/A | TCCCAGCACATTTACC | 82 | 1995 |
| 1516589 | 6320 | 6335 | 1222 | 1237 | GCGGGGACAGGGTCTC | 28 | 1996 |
| 1516607 | 6240 | 6255 | 1142 | 1157 | GGCGTTCAGTGATTGT | 14 | 1997 |
| 1516609 | 3790 | 3805 | N/A | N/A | AATCGCTGTTCAGAGC | 74 | 1998 |
| 1516621 | 5747 | 5762 | 649 | 664 | CGAGGCGCACCCGCAG | 84 | 1999 |
| 1516624 | 5782 | 5797 | 684 | 699 | GAGGAGCCGCTTACGC | 72 | 2000 |
| 1516627 | 5943 | 5958 | 845 | 860 | AGCGGCTGGCCGGCCA | 80 | 2001 |
| 1516655 | 5061 | 5076 | N/A | N/A | GGAAGCTAGAACCAGC | 67† | 2002 |
| 1516673 | 4310 | 4325 | N/A | N/A | CGCGCCCAGCGGAAAA | 94 | 2003 |
| 1516697 | 6344 | 6359 | 1246 | 1261 | GTCCACCCCAGGAGGA | 84 | 2004 |
| 1516700 | 3521 | 3536 | N/A | N/A | ACCCGGCCTCACCCCA | 107 | 2005 |
| 1516723 | 3037 | 3052 | N/A | N/A | CACCCCACCTTCTAGC | 101 | 2006 |
| 1516734 | 2930 | 2945 | N/A | N/A | CGAGTAGCTCTCCTGA | 82 | 2007 |
| 1516745 | 2914 | 2929 | N/A | N/A | GACTACCTGGAGGCCA | 76 | 2008 |
| 1516748 | 3443 | 3458 | N/A | N/A | CCGCCCCCAACCCATT | 96 | 2009 |
| 1516765 | 5559 | 5574 | 461 | 476 | TTGTAGGCCTTCAACT | 66 | 2010 |
| 1516772 | 6108 | 6123 | 1010 | 1025 | TGGAAGGCCTCGGCCT | 86 | 2011 |
| 1516778 | 6360 | 6375 | 1262 | 1277 | TCTTTATTAAACTAGG | 4 | 2012 |
| 1516779 | 5831 | 5846 | 733 | 748 | CCCCGGCCTGGTACAC | 84 | 2013 |
| 1516791 | 3451 | 3466 | N/A | N/A | TTACCAAGCCGCCCCC | 96 | 2014 |
| 1516796 | 6194 | 6209 | 1096 | 1111 | CGGCAGCCTGCACCTT | 66 | 2015 |
| 1516824 | 3655 | 3670 | N/A | N/A | TACCTGCCAGGAATGT | 79 | 2016 |
| 1516841 | 2849 | 2864 | 101 | 116 | GTGCCCCCGACTGCGC | 99 | 2017 |
| 1516847 | 3531 | 3546 | N/A | N/A | CCCGGCCCCAACCCGG | 96 | 2018 |
| 1516848 | 3183 | 3198 | N/A | N/A | CGACGGCTAGCTACCG | 65 | 2019 |
| 1516854 | 5841 | 5856 | 743 | 758 | CCCTCGCGGGCCCCGG | 84 | 2020 |
| 1516858 | 3664 | 3679 | N/A | N/A | CCGCCCCCATACCTGC | 95 | 2021 |
| 1516867 | 3152 | 3167 | N/A | N/A | CTCCCCAGTTATGGAG | 89 | 2022 |
| 1516876 | 3832 | 3847 | N/A | N/A | CCTATCTCAAGGATGG | 85 | 2023 |
| 1516881 | 6264 | 6279 | 1166 | 1181 | TGGGGTCGCATGGCTG | 21 | 2024 |
| 1516886 | 6296 | 6311 | 1198 | 1213 | GGCTGCGCGGAGGCAG | 18 | 2025 |
| 1516890 | 6312 | 6327 | 1214 | 1229 | AGGGTCTCCCGCTGCA | 13 | 2026 |
| 1516892 | 3072 | 3087 | N/A | N/A | TGCTATGGCTTACATC | 78 | 2027 |
| 1516896 | 3570 | 3585 | N/A | N/A | TGTCAATCAACCGCCA | 77 | 2028 |
| 1516915 | 3502 | 3517 | N/A | N/A | TAGCCTTCCAAGCCTT | 85 | 2029 |
| 1516917 | 3481 | 3496 | N/A | N/A | ATTATCTGCAACAGCC | 67 | 2030 |
| 1516922 | 4863 | 4878 | 345 | 360 | GTAATCCCAAAAGCGA | 40† | 2031 |
| 1516925 | 5986 | 6001 | 888 | 903 | CCGCGCGCGCAGCCGC | 56 | 2032 |
| 1516929 | 3633 | 3648 | 207 | 222 | CAACGCAGCCCACAGA | 57 | 2033 |
| 1516930 | 5194 | 5209 | N/A | N/A | TATAAAAGAGCTAGGG | 74† | 2034 |
| 1516934 | 6131 | 6146 | 1033 | 1048 | CGAACCAGCTCTTGAG | 53 | 2035 |
| 1516939 | 2938 | 2953 | N/A | N/A | CCCGACCCCGAGTAGC | 72 | 2036 |
| 1516947 | 5637 | 5652 | 539 | 554 | TGCGCCGCCTGCAGCT | 84 | 2037 |
| 1516962 | 5909 | 5924 | 811 | 826 | CCCGCACGCGGCCCTG | 68 | 2038 |
| 1516968 | 6248 | 6263 | 1150 | 1165 | CAGGCTTCGGCGTTCA | 41 | 2039 |
| 1516972 | 3319 | 3334 | N/A | N/A | CTCCCCACCGCCGGTT | 88 | 2040 |
| 1516992 | 6328 | 6343 | 1230 | 1245 | CGGCTGGGGCGGGGAC | 89 | 2041 |
| 1516994 | 5717 | 5732 | 619 | 634 | GGCCGAGCATGGCCTG | 98 | 2042 |
| 1517000 | 3393 | 3408 | N/A | N/A | CCCCATCCCCAGGTCG | 98 | 2043 |
| 1517010 | 4776 | 4791 | 258 | 273 | CTCCACCGCTTGCTCC | 145 | 2044 |
| 1517016 | 6336 | 6351 | 1238 | 1253 | CAGGAGGACGGCTGGG | 40 | 2045 |
| 1517024 | 6377 | 6392 | 1279 | 1294 | GCGTGAAACTTGGTGA | 21 | 2046 |
| 1517027 | 2947 | 2962 | N/A | N/A | CTCCCCAAGCCCGACC | 104 | 2047 |
| 1517040 | 6272 | 6287 | 1174 | 1189 | GGGTGGCGTGGGGTCG | 32 | 2048 |
| 1517050 | 6304 | 6319 | 1206 | 1221 | CCGCTGCAGGCTGCGC | 46 | 2049 |
| 1517059 | 3252 | 3267 | N/A | N/A | CCAACCTCACAGTTAA | 70 | 2050 |
| 1517063 | 6369 | 6384 | 1271 | 1286 | CTTGGTGAATCTTTAT | 24 | 2051 |
| 1517073 | 2873 | 2888 | 125 | 140 | CTAGAGGCCCCTGAGC | 82 | 2052 |
| 1517083 | 5035 | 5050 | N/A | N/A | GCCCCCCAAGACTTAG | 101† | 2053 |
| 1517088 | 5691 | 5706 | 593 | 608 | CGGTACTGCACCAGGC | 74 | 2054 |
| 1517100 | 6280 | 6295 | 1182 | 1197 | GAGGCACGGGGTGGCG | 41 | 2055 |
| 1517116 | 4615 | 4630 | N/A | N/A | TCGGTTTAATCACTTG | 63 | 2056 |
| 1517126 | 4705 | 4720 | N/A | N/A | ACCCCGTCCAGGCATC | 106 | 2057 |
| 1517129 | 3222 | 3237 | N/A | N/A | TTATGAGCTAATTCAG | 63 | 2058 |
| 1517130 | 6365 | 6380 | 1267 | 1282 | GTGAATCTTTATTAAA | 17 | 1982 |
| 1517131 | 6352 | 6367 | 1254 | 1269 | AAACTAGGGTCCACCC | 18 | 2059 |

TABLE 33
Reduction of APOE RNA by 3-10-3 cEt gapmers with mixed PO/PS internucleoside linkages
at a concentration of 4000 nM in Hep3B cells plated at 20,000 cells per well

| | SEQ ID | SEQ ID | SEQ ID | SEQ ID | | | |
|---|---|---|---|---|---|---|---|
| | No: 1 | No: 1 | No: 2 | No: 2 | | APOE | |
| Compound | Start | Stop | Start | Stop | | (% | SEQ ID |
| Number | Site | Site | Site | Site | Sequence (5′ to 3′) | UTC) | NO |
| 1335568 | 4214 | 4229 | N/A | N/A | CTGGTATTCACTATCT | 71 | 2060 |
| 1335581 | 4614 | 4629 | N/A | N/A | CGGTTTAATCACTTGG | 58 | 2061 |
| 1516525 | 5779 | 5794 | 681 | 696 | GAGCCGCTTACGCAGC | 90 | 2062 |
| 1516534 | 3530 | 3545 | N/A | N/A | CCGGCCCCAACCCGGC | 95 | 2063 |
| 1516536 | 4704 | 4719 | N/A | N/A | CCCCGTCCAGGCATCT | 105 | 2064 |
| 1516552 | 6351 | 6366 | 1253 | 1268 | AACTAGGGTCCACCCC | 37 | 2065 |
| 1516559 | 6255 | 6270 | 1157 | 1172 | ATGGCTGCAGGCTTCG | 23 | 2066 |
| 1516561 | 6319 | 6334 | 1221 | 1236 | CGGGGACAGGGTCTCC | 63 | 2067 |
| 1516576 | 3317 | 3332 | N/A | N/A | CCCCACCGCCGGTTCC | 103 | 2068 |
| 1516593 | 2937 | 2952 | N/A | N/A | CCGACCCCGAGTAGCT | 105 | 2069 |
| 1516594 | 3190 | 3205 | N/A | N/A | CTCCAATCGACGGCTA | 72 | 2070 |
| 1516602 | 5908 | 5923 | 810 | 825 | CCGCACGCGGCCCTGT | 81 | 2071 |
| 1516638 | 2867 | 2882 | 119 | 134 | GCCCCTGAGCTCATCC | 78 | 2072 |
| 1516641 | 3501 | 3516 | N/A | N/A | AGCCTTCCAAGCCTTG | 70 | 2073 |
| 1516658 | 6359 | 6374 | 1261 | 1276 | CTTTATTAAACTAGGG | 6 | 2074 |
| 1516668 | 6327 | 6342 | 1229 | 1244 | GGCTGGGGCGGGGACA | 77 | 2075 |
| 1516670 | 3842 | 3857 | N/A | N/A | ACTTCTAACTCCTATC | 74 | 2076 |
| 1516674 | 4985 | 5000 | N/A | N/A | GTATAGCCGCCCACCA | 88† | 2077 |
| 1516675 | 6106 | 6121 | 1008 | 1023 | GAAGGCCTCGGCCTGC | 90 | 2078 |
| 1516677 | 5984 | 5999 | 886 | 901 | GCGCGCGCAGCCGCTC | 82 | 2079 |
| 1516684 | 3035 | 3050 | N/A | N/A | CCCCACCTTCTAGCGG | 84 | 2080 |
| 1516686 | 5009 | 5024 | N/A | N/A | AGAATGAAACCTGGAC | 90† | 2081 |
| 1516703 | 4187 | 4202 | N/A | N/A | ATTAGAAACCTCTAAC | 81 | 2082 |
| 1516707 | 6343 | 6358 | 1245 | 1260 | TCCACCCCAGGAGGAC | 86 | 2083 |
| 1516708 | 4774 | 4789 | 256 | 271 | CCACCGCTTGCTCCAC | 89 | 2084 |
| 1516710 | 5165 | 5180 | N/A | N/A | GAGCCAGGACGAGTGT | 98† | 2085 |
| 1516713 | 3142 | 3157 | N/A | N/A | ATGGAGATCTGAGGAC | 83 | 2086 |
| 1516718 | 4975 | 4990 | N/A | N/A | CCACCAGGAGGGTCAA | 82† | 2087 |
| 1516726 | 6376 | 6391 | 1278 | 1293 | CGTGAAACTTGGTGAA | 33 | 2088 |
| 1516755 | 3427 | 3442 | N/A | N/A | CCCTATTTAACTCCCT | 82 | 2089 |
| 1516763 | 4854 | 4869 | 336 | 351 | AAAGCGACCCAGTGCC | 32† | 2090 |
| 1516775 | 3831 | 3846 | N/A | N/A | CTATCTCAAGGATGGG | 77 | 2091 |
| 1516782 | 6303 | 6318 | 1205 | 1220 | CGCTGCAGGCTGCGCG | 81 | 2092 |
| 1516788 | 4862 | 4877 | 344 | 359 | TAATCCCAAAAGCGAC | 55† | 2093 |
| 1516792 | 6279 | 6294 | 1181 | 1196 | AGGCACGGGGTGGCGT | 56 | 2094 |
| 1516794 | 6239 | 6254 | 1141 | 1156 | GCGTTCAGTGATTGTC | 19 | 2095 |
| 1516797 | 5829 | 5844 | 731 | 746 | CCGGCCTGGTACACTG | 95 | 2096 |
| 1516803 | 3251 | 3266 | N/A | N/A | CAACCTCACAGTTAAG | 80 | 2097 |
| 1516809 | 6247 | 6262 | 1149 | 1164 | AGGCTTCGGCGTTCAG | 38 | 2098 |
| 1516814 | 4309 | 4324 | N/A | N/A | GCGCCCAGCGGAAAAG | 97 | 2099 |
| 1516815 | 6287 | 6302 | 1189 | 1204 | GAGGCAGGAGGCACGG | 80 | 2100 |
| 1516837 | 3569 | 3584 | N/A | N/A | GTCAATCAACCGCCAG | 79 | 2101 |
| 1516850 | 3071 | 3086 | N/A | N/A | GCTATGGCTTACATCC | 87 | 2102 |
| 1516860 | 3680 | 3695 | N/A | N/A | GGGAACCGAGCAAGCC | 99 | 2103 |
| 1516865 | 5556 | 5571 | 458 | 473 | TAGGCCTTCAACTCCT | 88 | 2104 |
| 1516884 | 6172 | 6187 | 1074 | 1089 | CAGCCCGGCCCACTGG | 81 | 2105 |
| 1516900 | 3480 | 3495 | N/A | N/A | TTATCTGCAACAGCCT | 79 | 2106 |
| 1516907 | 5716 | 5731 | 618 | 633 | GCCGAGCATGGCCTGC | 86 | 2107 |
| 1516908 | 5840 | 5855 | 742 | 757 | CCTCGCGGGCCCCGGC | 100 | 2108 |
| 1516935 | 3182 | 3197 | N/A | N/A | GACGGCTAGCTACCGT | 88 | 2109 |
| 1516936 | 6311 | 6326 | 1213 | 1228 | GGGTCTCCCGCTGCAG | 26 | 2110 |
| 1516938 | 5688 | 5703 | 590 | 605 | TACTGCACCAGGCGGC | 66 | 2111 |
| 1516948 | 6271 | 6286 | 1173 | 1188 | GGTGGCGTGGGGTCGC | 34 | 2112 |
| 1516951 | 3645 | 3660 | 219 | 234 | GAATGTGACCAGCAAC | 54 | 2113 |
| 1516955 | 5746 | 5761 | 648 | 663 | GAGGCGCACCCGCAGC | 99 | 2114 |
| 1516961 | 5636 | 5651 | 538 | 553 | GCGCCGCCTGCAGCTC | 75 | 2115 |
| 1516963 | 3450 | 3465 | N/A | N/A | TACCAAGCCGCCCCCA | 90 | 2116 |
| 1516964 | 2913 | 2928 | N/A | N/A | ACTACCTGGAGGCCAG | 99 | 2117 |
| 1516974 | 6368 | 6383 | 1270 | 1285 | TTGGTGAATCTTTATT | 25 | 2118 |
| 1516977 | 5059 | 5074 | N/A | N/A | AAGCTAGAACCAGCAG | 81† | 2119 |
| 1516978 | 5934 | 5949 | 836 | 851 | CCGGCCAGGGAGCCCA | 85 | 2120 |
| 1516981 | 3515 | 3530 | N/A | N/A | CCTCACCCCAGGTTAG | 83 | 2121 |
| 1516987 | 6130 | 6145 | 1032 | 1047 | GAACCAGCTCTTGAGG | 59 | 2122 |
| 1516991 | 3221 | 3236 | N/A | N/A | TATGAGCTAATTCAGT | 71 | 2123 |
| 1517005 | 3309 | 3324 | N/A | N/A | CCGGTTCCATCTCAGT | 82 | 2124 |
| 1517014 | 6295 | 6310 | 1197 | 1212 | GCTGCGCGGAGGCAGG | 76 | 2125 |
| 1517021 | 2848 | 2863 | 100 | 115 | TGCCCCCGACTGCGCT | 92 | 2126 |
| 1517031 | 6263 | 6278 | 1165 | 1180 | GGGGTCGCATGGCTGC | 59 | 2127 |
| 1517033 | 3458 | 3473 | N/A | N/A | AGCACATTTACCAAGC | 87 | 2128 |
| 1517036 | 2929 | 2944 | N/A | N/A | GAGTAGCTCTCCTGAG | 79 | 2129 |
| 1517038 | 6335 | 6350 | 1237 | 1252 | AGGAGGACGGCTGGGG | 87 | 2130 |
| 1517046 | 5034 | 5049 | N/A | N/A | CCCCCCAAGACTTAGC | 83† | 2131 |
| 1517054 | 3663 | 3678 | N/A | N/A | CGCCCCCATACCTGCC | 85 | 2132 |
| 1517057 | 3442 | 3457 | N/A | N/A | CGCCCCCAACCCATTC | 86 | 2133 |
| 1517065 | 2946 | 2961 | N/A | N/A | TCCCCAAGCCCGACCC | 79 | 2134 |
| 1517069 | 3632 | 3647 | 206 | 221 | AACGCAGCCCACAGAA | 67 | 2135 |
| 1517109 | 3391 | 3406 | N/A | N/A | CCATCCCCAGGTCGGC | 97 | 2136 |
| 1517130 | 6365 | 6380 | 1267 | 1282 | GTGAATCTTTATTAAA | 29 | 1982 |

TABLE 34
Reduction of APOE RNA by 3-10-3 cEt gapmers with mixed PO/PS internucleoside linkages
at a concentration of 4000 nM in Hep3B cells plated at 20,000 cells per well

| | SEQ ID | SEQ ID | SEQ ID | SEQ ID | | | |
|---|---|---|---|---|---|---|---|
| | No: 1 | No: 1 | No: 2 | No: 2 | | APOE | |
| Compound | Start | Stop | Start | Stop | | (% | SEQ ID |
| Number | Site | Site | Site | Site | Sequence (5′ to 3′) | UTC) | NO |
| 1516551 | 2847 | 2862 | 99 | 114 | GCCCCCGACTGCGCTT | 92 | 2137 |
| 1516560 | 2864 | 2879 | 116 | 131 | CCTGAGCTCATCCCCG | 99 | 2138 |
| 1516563 | 3640 | 3655 | 214 | 229 | TGACCAGCAACGCAGC | 50 | 2139 |
| 1516575 | 6318 | 6333 | 1220 | 1235 | GGGGACAGGGTCTCCC | 75 | 2140 |
| 1516579 | 3476 | 3491 | N/A | N/A | CTGCAACAGCCTAATC | 89 | 2141 |
| 1516581 | 5686 | 5701 | 588 | 603 | CTGCACCAGGCGGCCG | 126 | 2142 |
| 1516588 | 2944 | 2959 | N/A | N/A | CCCAAGCCCGACCCCG | 92 | 2143 |
| 1516595 | 5704 | 5719 | 606 | 621 | CTGCACCTCGCCGCGG | 94 | 2144 |
| 1516596 | 4185 | 4200 | N/A | N/A | TAGAAACCTCTAACTC | 88 | 2145 |
| 1516606 | 3189 | 3204 | N/A | N/A | TCCAATCGACGGCTAG | 77 | 2146 |
| 1516616 | 5778 | 5793 | 680 | 695 | AGCCGCTTACGCAGCT | 99 | 2147 |
| 1516618 | 4613 | 4628 | N/A | N/A | GGTTTAATCACTTGGA | 74 | 2148 |
| 1516623 | 4896 | 4911 | 378 | 393 | CACCTGCTCAGACAGT | 24† | 2149 |
| 1516632 | 5057 | 5072 | N/A | N/A | GCTAGAACCAGCAGAG | 88† | 2150 |
| 1516644 | 6171 | 6186 | 1073 | 1088 | AGCCCGGCCCACTGGC | 87 | 2151 |
| 1516645 | 3631 | 3646 | 205 | 220 | ACGCAGCCCACAGAAC | 74 | 2152 |
| 1516646 | 6238 | 6253 | 1140 | 1155 | CGTTCAGTGATTGTCG | 21 | 2153 |
| 1516656 | 6254 | 6269 | 1156 | 1171 | TGGCTGCAGGCTTCGG | 17 | 2154 |
| 1516662 | 4984 | 4999 | N/A | N/A | TATAGCCGCCCACCAG | 90† | 2155 |
| 1516667 | 5008 | 5023 | N/A | N/A | GAATGAAACCTGGACC | 100† | 2156 |
| 1516680 | 3294 | 3309 | N/A | N/A | TCCCAGTCTCGCATTC | 85 | 2157 |
| 1516681 | 6367 | 6382 | 1269 | 1284 | TGGTGAATCTTTATTA | 26 | 2158 |
| 1516682 | 5033 | 5048 | N/A | N/A | CCCCCAAGACTTAGCG | 100† | 2159 |
| 1516688 | 6278 | 6293 | 1180 | 1195 | GGCACGGGGTGGCGTG | 38 | 2160 |
| 1516696 | 6105 | 6120 | 1007 | 1022 | AAGGCCTCGGCCTGCA | 84 | 2161 |
| 1516704 | 3457 | 3472 | N/A | N/A | GCACATTTACCAAGCC | 89 | 2162 |
| 1516706 | 3426 | 3441 | N/A | N/A | CCTATTTAACTCCCTC | 75 | 2163 |
| 1516709 | 4861 | 4876 | 343 | 358 | AATCCCAAAAGCGACC | 25† | 2164 |
| 1516716 | 3437 | 3452 | N/A | N/A | CCAACCCATTCCCTAT | 112 | 2165 |
| 1516730 | 5824 | 5839 | 726 | 741 | CTGGTACACTGCCAGG | 89 | 2166 |
| 1516736 | 6294 | 6309 | 1196 | 1211 | CTGCGCGGAGGCAGGA | 64 | 2167 |
| 1516742 | 3498 | 3513 | N/A | N/A | CTTCCAAGCCTTGTTG | 94 | 2168 |
| 1516743 | 6375 | 6390 | 1277 | 1292 | GTGAAACTTGGTGAAT | 35 | 2169 |
| 1516744 | 4853 | 4868 | 335 | 350 | AAGCGACCCAGTGCCA | 33† | 2170 |
| 1516746 | 6326 | 6341 | 1228 | 1243 | GCTGGGGCGGGGACAG | 84 | 2171 |
| 1516749 | 3567 | 3582 | N/A | N/A | CAATCAACCGCCAGTG | 98 | 2172 |
| 1516756 | 3529 | 3544 | N/A | N/A | CGGCCCCAACCCGGCC | 83 | 2173 |
| 1516761 | 3679 | 3694 | N/A | N/A | GGAACCGAGCAAGCCC | 86 | 2174 |
| 1516762 | 6334 | 6349 | 1236 | 1251 | GGAGGACGGCTGGGGC | 82 | 2175 |
| 1516774 | 6286 | 6301 | 1188 | 1203 | AGGCAGGAGGCACGGG | 29 | 2176 |
| 1516783 | 3809 | 3824 | N/A | N/A | CGAGGCCCAGAGAGCG | 79 | 2177 |
| 1516785 | 5547 | 5562 | 449 | 464 | AACTCCTTCATGGTCT | 51 | 2178 |
| 1516790 | 3316 | 3331 | N/A | N/A | CCCACCGCCGGTTCCA | 84 | 2179 |
| 1516805 | 5983 | 5998 | 885 | 900 | CGCGCGCAGCCGCTCG | 75 | 2180 |
| 1516807 | 6342 | 6357 | 1244 | 1259 | CCACCCCAGGAGGACG | 64 | 2181 |
| 1516812 | 3250 | 3265 | N/A | N/A | AACCTCACAGTTAAGC | 76 | 2182 |
| 1516822 | 3514 | 3529 | N/A | N/A | CTCACCCCAGGTTAGC | 85 | 2183 |
| 1516827 | 6129 | 6144 | 1031 | 1046 | AACCAGCTCTTGAGGC | 73 | 2184 |
| 1516869 | 2879 | 2894 | 131 | 146 | CTCTTTCTAGAGGCCC | 74 | 2185 |
| 1516888 | 3839 | 3854 | N/A | N/A | TCTAACTCCTATCTCA | 79 | 2186 |
| 1516913 | 5624 | 5639 | 526 | 541 | GCTCCTTGGACAGCCG | 87 | 2187 |
| 1516924 | 3662 | 3677 | N/A | N/A | GCCCCCATACCTGCCA | 93 | 2188 |
| 1516928 | 3449 | 3464 | N/A | N/A | ACCAAGCCGCCCCCAA | 91 | 2189 |
| 1516950 | 6270 | 6285 | 1172 | 1187 | GTGGCGTGGGGTCGCA | 29 | 2190 |
| 1516953 | 5933 | 5948 | 835 | 850 | CGGCCAGGGAGCCCAC | 75 | 2191 |
| 1516956 | 5745 | 5760 | 647 | 662 | AGGCGCACCCGCAGCT | 76 | 2192 |
| 1516957 | 2995 | 3010 | N/A | N/A | CCTTCCCAGGTCCAGT | 91 | 2193 |
| 1516958 | 3220 | 3235 | N/A | N/A | ATGAGCTAATTCAGTC | 61 | 2194 |
| 1516965 | 6302 | 6317 | 1204 | 1219 | GCTGCAGGCTGCGCGG | 43 | 2195 |
| 1516966 | 5839 | 5854 | 741 | 756 | CTCGCGGGCCCCGGCC | 70 | 2196 |
| 1516969 | 3069 | 3084 | N/A | N/A | TATGGCTTACATCCCA | 80 | 2197 |
| 1516984 | 3181 | 3196 | N/A | N/A | ACGGCTAGCTACCGTG | 91 | 2198 |
| 1516996 | 3137 | 3152 | N/A | N/A | GATCTGAGGACACTGG | 86 | 2199 |
| 1517006 | 6350 | 6365 | 1252 | 1267 | ACTAGGGTCCACCCCA | 49 | 2200 |
| 1517019 | 4213 | 4228 | N/A | N/A | TGGTATTCACTATCTG | 69 | 2201 |
| 1517025 | 3389 | 3404 | N/A | N/A | ATCCCCAGGTCGGCCT | 86 | 2202 |
| 1517042 | 4741 | 4756 | N/A | N/A | TGTGGAACAAGTTCAA | 87 | 2203 |
| 1517056 | 5907 | 5922 | 809 | 824 | CGCACGCGGCCCTGTT | 64 | 2204 |
| 1517061 | 4305 | 4320 | N/A | N/A | CCAGCGGAAAAGCATG | 101 | 2205 |
| 1517062 | 6246 | 6261 | 1148 | 1163 | GGCTTCGGCGTTCAGT | 34 | 2206 |
| 1517077 | 2923 | 2938 | N/A | N/A | CTCTCCTGAGACTACC | 84 | 2207 |
| 1517082 | 6358 | 6373 | 1260 | 1275 | TTTATTAAACTAGGGT | 10 | 2208 |
| 1517085 | 6262 | 6277 | 1164 | 1179 | GGGTCGCATGGCTGCA | 18 | 2209 |
| 1517099 | 2936 | 2951 | N/A | N/A | CGACCCCGAGTAGCTC | 79 | 2210 |
| 1517107 | 6310 | 6325 | 1212 | 1227 | GGTCTCCCGCTGCAGG | 31 | 2211 |
| 1517124 | 5102 | 5117 | N/A | N/A | GAATTCCAGAGAGCTA | 90† | 2212 |
| 1517130 | 6365 | 6380 | 1267 | 1282 | GTGAATCTTTATTAAA | 32 | 1982 |
| 1517135 | 4700 | 4715 | N/A | N/A | GTCCAGGCATCTAGTA | 75 | 2213 |

TABLE 35
Reduction of APOE RNA by 3-10-3 cEt gapmers
with mixed PO/PS internucleoside linkages at a
concentration of 4000 nM in Hep3B cells
plated at 20,000 cells per well

| | SEQ | SEQ | SEQ | SEQ | | | |
|---|---|---|---|---|---|---|---|
| | ID No: | ID No: | ID No: | ID No: | | | |
| | 1 | 1 | 2 | 2 | | APOE | |
| Compound | Start | Stop | Start | Stop | Sequence | (% | SEQ |
| Number | Site | Site | Site | Site | (5′ to 3′) | UTC) | ID NO |
| 1335571 | 3068 | 3083 | N/A | N/A | ATGGCTTACATCCCAG | 99 | 2214 |
| 1335663 | 4184 | 4199 | N/A | N/A | AGAAACCTCTAACTCC | 50 | 2215 |
| 1335673 | 3678 | 3693 | N/A | N/A | GAACCGAGCAAGCCCC | 86 | 2216 |
| 1335678 | 3425 | 3440 | N/A | N/A | CTATTTAACTCCCTCC | 82 | 2217 |
| 1335679 | 3105 | 3120 | N/A | N/A | CTCGATAAATGATAGT | 75 | 2218 |
| 1516529 | 4696 | 4711 | N/A | N/A | AGGCATCTAGTACCTA | 78 | 2219 |
| 1516537 | 4860 | 4875 | 342 | 357 | ATCCCAAAAGCGACCC | 15† | 2220 |
| 1516538 | 5545 | 5560 | 447 | 462 | CTCCTTCATGGTCTCG | 47 | 2221 |
| 1516545 | 5837 | 5852 | 739 | 754 | CGCGGGCCCCGGCCTG | 75 | 2222 |
| 1516553 | 6357 | 6372 | 1259 | 1274 | TTATTAAACTAGGGTC | 16 | 2223 |
| 1516567 | 6055 | 6070 | 957 | 972 | GCGCACCTCCGCCACC | 66 | 2224 |
| 1516568 | 6116 | 6131 | 1018 | 1033 | GGCGGGCCTGGAAGGC | 74 | 2225 |
| 1516570 | 6253 | 6268 | 1155 | 1170 | GGCTGCAGGCTTCGGC | 18 | 2226 |
| 1516571 | 5006 | 5021 | N/A | N/A | ATGAAACCTGGACCTG | 88† | 2227 |
| 1516591 | 3639 | 3654 | 213 | 228 | GACCAGCAACGCAGCC | 67 | 2228 |
| 1516598 | 3626 | 3641 | 200 | 215 | GCCCACAGAACCTTCA | 68 | 2229 |
| 1516603 | 6277 | 6292 | 1179 | 1194 | GCACGGGGTGGCGTGG | 39 | 2230 |
| 1516611 | 3513 | 3528 | N/A | N/A | TCACCCCAGGTTAGCC | 111 | 2231 |
| 1516613 | 6366 | 6381 | 1268 | 1283 | GGTGAATCTTTATTAA | 6 | 2232 |
| 1516615 | 3456 | 3471 | N/A | N/A | CACATTTACCAAGCCG | 65 | 2233 |
| 1516629 | 2921 | 2936 | N/A | N/A | CTCCTGAGACTACCTG | 77 | 2234 |
| 1516630 | 5623 | 5638 | 525 | 540 | CTCCTTGGACAGCCGT | 44 | 2235 |
| 1516633 | 4211 | 4226 | N/A | N/A | GTATTCACTATCTGCC | 85 | 2236 |
| 1516657 | 5777 | 5792 | 679 | 694 | GCCGCTTACGCAGCTT | 91 | 2237 |
| 1516661 | 3475 | 3490 | N/A | N/A | TGCAACAGCCTAATCC | 80 | 2238 |
| 1516666 | 4869 | 4884 | 351 | 366 | GCGCAGGTAATCCCAA | 29† | 2239 |
| 1516692 | 4852 | 4867 | 334 | 349 | AGCGACCCAGTGCCAG | 30† | 2240 |
| 1516750 | 6237 | 6252 | 1139 | 1154 | GTTCAGTGATTGTCGC | 20 | 2241 |
| 1516757 | 3180 | 3195 | N/A | N/A | CGGCTAGCTACCGTGT | 70 | 2242 |
| 1516769 | 2878 | 2893 | 130 | 145 | TCTTTCTAGAGGCCCC | 85 | 2243 |
| 1516770 | 5925 | 5940 | 827 | 842 | GAGCCCACAGTGGCGG | 96 | 2244 |
| 1516777 | 3838 | 3853 | N/A | N/A | CTAACTCCTATCTCAA | 65 | 2245 |
| 1516780 | 5055 | 5070 | N/A | N/A | TAGAACCAGCAGAGAC | 95† | 2246 |
| 1516784 | 6309 | 6324 | 1211 | 1226 | GTCTCCCGCTGCAGGC | 31 | 2247 |
| 1516793 | 3377 | 3392 | N/A | N/A | GCCTCCATAGAAAATT | 109 | 2248 |
| 1516799 | 4983 | 4998 | N/A | N/A | ATAGCCGCCCACCAGG | 82† | 2249 |
| 1516802 | 6349 | 6364 | 1251 | 1266 | CTAGGGTCCACCCCAG | 60 | 2250 |
| 1516810 | 3315 | 3330 | N/A | N/A | CCACCGCCGGTTCCAT | 96 | 2251 |
| 1516811 | 6170 | 6185 | 1072 | 1087 | GCCCGGCCCACTGGCG | 44 | 2252 |
| 1516819 | 6317 | 6332 | 1219 | 1234 | GGGACAGGGTCTCCCG | 72 | 2253 |
| 1516828 | 6269 | 6284 | 1171 | 1186 | TGGCGTGGGGTCGCAT | 28 | 2254 |
| 1516834 | 6374 | 6389 | 1276 | 1291 | TGAAACTTGGTGAATC | 22 | 2255 |
| 1516842 | 5032 | 5047 | N/A | N/A | CCCCAAGACTTAGCGA | 91† | 2256 |
| 1516844 | 6341 | 6356 | 1243 | 1258 | CACCCCAGGAGGACGG | 70 | 2257 |
| 1516845 | 3248 | 3263 | N/A | N/A | CCTCACAGTTAAGCGC | 69 | 2258 |
| 1516866 | 6261 | 6276 | 1163 | 1178 | GGTCGCATGGCTGCAG | 11 | 2259 |
| 1516875 | 2845 | 2860 | 97 | 112 | CCCCGACTGCGCTTCT | 87 | 2260 |
| 1516882 | 3188 | 3203 | N/A | N/A | CCAATCGACGGCTAGC | 96 | 2261 |
| 1516885 | 2935 | 2950 | N/A | N/A | GACCCCGAGTAGCTCT | 79 | 2262 |
| 1516904 | 3436 | 3451 | N/A | N/A | CAACCCATTCCCTATT | 72 | 2263 |
| 1516906 | 5097 | 5112 | N/A | N/A | CCAGAGAGCTAAAGCC | 77† | 2264 |
| 1516940 | 6285 | 6300 | 1187 | 1202 | GGCAGGAGGCACGGGG | 46 | 2265 |
| 1516946 | 3263 | 3278 | N/A | N/A | CATTCTAAGCTCCAAC | 74 | 2266 |
| 1516949 | 6333 | 6348 | 1235 | 1250 | GAGGACGGCTGGGGCG | 50 | 2267 |
| 1516954 | 3526 | 3541 | N/A | N/A | CCCCAACCCGGCCTCA | 84 | 2268 |
| 1516959 | 3795 | 3810 | N/A | N/A | CGTCAAATCGCTGTTC | 71 | 2269 |
| 1516982 | 5823 | 5838 | 725 | 740 | TGGTACACTGCCAGGC | 46 | 2270 |
| 1516983 | 5906 | 5921 | 808 | 823 | GCACGCGGCCCTGTTC | 56 | 2271 |
| 1516985 | 6245 | 6260 | 1147 | 1162 | GCTTCGGCGTTCAGTG | 32 | 2272 |
| 1516993 | 5743 | 5758 | 645 | 660 | GCGCACCCGCAGCTCC | 90 | 2273 |
| 1517002 | 4548 | 4563 | N/A | N/A | GTGCAGCGGCCTGAAC | 93 | 2274 |
| 1517022 | 4304 | 4319 | N/A | N/A | CAGCGGAAAAGCATGT | 97 | 2275 |
| 1517034 | 6325 | 6340 | 1227 | 1242 | CTGGGGCGGGGACAGG | 93 | 2276 |
| 1517043 | 4739 | 4754 | N/A | N/A | TGGAACAAGTTCAAGG | 103 | 2277 |
| 1517044 | 3566 | 3581 | N/A | N/A | AATCAACCGCCAGTGA | 80 | 2278 |
| 1517047 | 5697 | 5712 | 599 | 614 | TCGCCGCGGTACTGCA | 94 | 2279 |
| 1517053 | 2994 | 3009 | N/A | N/A | CTTCCCAGGTCCAGTC | 70 | 2280 |
| 1517060 | 6293 | 6308 | 1195 | 1210 | TGCGCGGAGGCAGGAG | 38 | 2281 |
| 1517084 | 2859 | 2874 | 111 | 126 | GCTCATCCCCGTGCCC | 65 | 2282 |
| 1517094 | 3448 | 3463 | N/A | N/A | CCAAGCCGCCCCCAAC | 77 | 2283 |
| 1517095 | 6301 | 6316 | 1203 | 1218 | CTGCAGGCTGCGCGGA | 63 | 2284 |
| 1517106 | 3660 | 3675 | N/A | N/A | CCCCATACCTGCCAGG | 93 | 2285 |
| 1517112 | 2943 | 2958 | N/A | N/A | CCAAGCCCGACCCCGA | 88 | 2286 |
| 1517118 | 3497 | 3512 | N/A | N/A | TTCCAAGCCTTGTTGC | 80 | 2287 |
| 1517130 | 6365 | 6380 | 1267 | 1282 | GTGAATCTTTATTAAA | 19 | 1982 |
| 1517134 | 3218 | 3233 | N/A | N/A | GAGCTAATTCAGTCCT | 68 | 2288 |
| 1517137 | 5685 | 5700 | 587 | 602 | TGCACCAGGCGGCCGC | 96 | 2289 |
| 1517138 | 5982 | 5997 | 884 | 899 | GCGCGCAGCCGCTCGC | 84 | 2290 |

TABLE 36
Reduction of APOE RNA by 3-10-3 cEt gapmers
with mixed PO/PS internucleoside linkages at a
concentration of 4000 nM in Hep3B cells plated
at 20,000 cells per well

| | SEQ | SEQ | SEQ | SEQ | | | |
|---|---|---|---|---|---|---|---|
| | ID No: | ID No: | ID No: | ID No: | | | |
| | 1 | 1 | 2 | 2 | | APOE | |
| Compound | Start | Stop | Start | Stop | Sequence | (% | SEQ |
| Number | Site | Site | Site | Site | (5′ to 3′) | UTC) | ID NO |
| 1335572 | 3474 | 3489 | N/A | N/A | GCAACAGCCTAATCCC | 65 | 2291 |
| 1335676 | 3455 | 3470 | N/A | N/A | ACATTTACCAAGCCGC | 74 | 2292 |
| 1516531 | 2942 | 2957 | N/A | N/A | CAAGCCCGACCCCGAG | 93 | 2293 |
| 1516535 | 3447 | 3462 | N/A | N/A | CAAGCCGCCCCCAACC | 79 | 2294 |
| 1516540 | 6340 | 6355 | 1242 | 1257 | ACCCCAGGAGGACGGC | 65 | 2295 |
| 1516541 | 5522 | 5537 | N/A | N/A | GCGCCCTGCGGCCGAG | 102† | 2296 |
| 1516542 | 3837 | 3852 | N/A | N/A | TAACTCCTATCTCAAG | 129 | 2297 |
| 1516547 | 5662 | 5677 | 564 | 579 | CTCCATGTCCGCGCCC | 46 | 2298 |
| 1516564 | 3565 | 3580 | N/A | N/A | ATCAACCGCCAGTGAG | 89 | 2299 |
| 1516569 | 4694 | 4709 | N/A | N/A | GCATCTAGTACCTAGG | 72 | 2300 |
| 1516574 | 4738 | 4753 | N/A | N/A | GGAACAAGTTCAAGGT | 94 | 2301 |
| 1516587 | 5835 | 5850 | 737 | 752 | CGGGCCCCGGCCTGGT | 91 | 2302 |
| 1516592 | 3578 | 3593 | N/A | N/A | GGAGAAACTGTCAATC | 101 | 2303 |
| 1516620 | 6356 | 6371 | 1258 | 1273 | TATTAAACTAGGGTCC | 28 | 2304 |
| 1516642 | 5742 | 5757 | 644 | 659 | CGCACCCGCAGCTCCT | 62 | 2305 |
| 1516659 | 3659 | 3674 | N/A | N/A | CCCATACCTGCCAGGA | 95 | 2306 |
| 1516671 | 5914 | 5929 | 816 | 831 | GGCGGCCCGCACGCGG | 105 | 2307 |
| 1516679 | 3314 | 3329 | N/A | N/A | CACCGCCGGTTCCATC | 83 | 2308 |
| 1516690 | 2877 | 2892 | 129 | 144 | CTTTCTAGAGGCCCCT | 87 | 2309 |
| 1516691 | 3217 | 3232 | N/A | N/A | AGCTAATTCAGTCCTC | 73 | 2310 |
| 1516694 | 3677 | 3692 | N/A | N/A | AACCGAGCAAGCCCCG | 100 | 2311 |
| 1516695 | 6114 | 6129 | 1016 | 1031 | CGGGCCTGGAAGGCCT | 94 | 2312 |
| 1516712 | 6292 | 6307 | 1194 | 1209 | GCGCGGAGGCAGGAGG | 74 | 2313 |
| 1516715 | 6236 | 6251 | 1138 | 1153 | TTCAGTGATTGTCGCT | 28 | 2314 |
| 1516717 | 3512 | 3527 | N/A | N/A | CACCCCAGGTTAGCCT | 93 | 2315 |
| 1516721 | 5980 | 5995 | 882 | 897 | GCGCAGCCGCTCGCCC | 76 | 2316 |
| 1516732 | 4982 | 4997 | N/A | N/A | TAGCCGCCCACCAGGA | 86† | 2317 |
| 1516737 | 6252 | 6267 | 1154 | 1169 | GCTGCAGGCTTCGGCG | 66 | 2318 |
| 1516741 | 3376 | 3391 | N/A | N/A | CCTCCATAGAAAATTC | 90 | 2319 |
| 1516753 | 5094 | 5109 | N/A | N/A | GAGAGCTAAAGCCAGG | 81† | 2320 |
| 1516758 | 6373 | 6388 | 1275 | 1290 | GAAACTTGGTGAATCT | 20 | 2321 |
| 1516760 | 5005 | 5020 | N/A | N/A | TGAAACCTGGACCTGG | 79† | 2322 |
| 1516768 | 5776 | 5791 | 678 | 693 | CCGCTTACGCAGCTTG | 64 | 2323 |
| 1516771 | 6260 | 6275 | 1162 | 1177 | GTCGCATGGCTGCAGG | 20 | 2324 |
| 1516787 | 3496 | 3511 | N/A | N/A | TCCAAGCCTTGTTGCA | 80 | 2325 |
| 1516789 | 4194 | 4209 | N/A | N/A | GCAATGCATTAGAAAC | 75 | 2326 |
| 1516817 | 3525 | 3540 | N/A | N/A | CCCAACCCGGCCTCAC | 126 | 2327 |
| 1516823 | 5905 | 5920 | 807 | 822 | CACGCGGCCCTGTTCC | 77 | 2328 |
| 1516829 | 2992 | 3007 | N/A | N/A | TCCCAGGTCCAGTCCC | 104 | 2329 |
| 1516830 | 6015 | 6030 | 917 | 932 | TCGCGGGTCCGGCTGC | 79 | 2330 |
| 1516832 | 6284 | 6299 | 1186 | 1201 | GCAGGAGGCACGGGGT | 29 | 2331 |
| 1516840 | 2919 | 2934 | N/A | N/A | CCTGAGACTACCTGGA | 77 | 2332 |
| 1516843 | 3067 | 3082 | N/A | N/A | TGGCTTACATCCCAGT | 83 | 2333 |
| 1516846 | 4545 | 4560 | N/A | N/A | CAGCGGCCTGAACATG | 92 | 2334 |
| 1516851 | 6332 | 6347 | 1234 | 1249 | AGGACGGCTGGGGCGG | 39 | 2335 |
| 1516857 | 2856 | 2871 | 108 | 123 | CATCCCCGTGCCCCCG | 84 | 2336 |
| 1516861 | 2844 | 2859 | 96 | 111 | CCCGACTGCGCTTCTC | 91 | 2337 |
| 1516871 | 4859 | 4874 | 341 | 356 | TCCCAAAAGCGACCCA | 14† | 2338 |
| 1516880 | 5695 | 5710 | 597 | 612 | GCCGCGGTACTGCACC | 60 | 2339 |
| 1516887 | 6316 | 6331 | 1218 | 1233 | GGACAGGGTCTCCCGC | 43 | 2340 |
| 1516909 | 5031 | 5046 | N/A | N/A | CCCAAGACTTAGCGAC | 80† | 2341 |
| 1516916 | 3422 | 3437 | N/A | N/A | TTTAACTCCCTCCTGG | 66 | 2342 |
| 1516921 | 6364 | 6379 | 1266 | 1281 | TGAATCTTTATTAAAC | 38 | 2343 |
| 1516931 | 6308 | 6323 | 1210 | 1225 | TCTCCCGCTGCAGGCT | 17 | 2344 |
| 1516937 | 4868 | 4883 | 350 | 365 | CGCAGGTAATCCCAAA | 9† | 2345 |
| 1516942 | 3104 | 3119 | N/A | N/A | TCGATAAATGATAGTG | 80 | 2346 |
| 1516970 | 3637 | 3652 | 211 | 226 | CCAGCAACGCAGCCCA | 58 | 2347 |
| 1516986 | 6300 | 6315 | 1202 | 1217 | TGCAGGCTGCGCGGAG | 31 | 2348 |
| 1517018 | 3794 | 3809 | N/A | N/A | GTCAAATCGCTGTTCA | 78 | 2349 |
| 1517030 | 5799 | 5814 | 701 | 716 | AGGTCATCGGCATCGC | 47 | 2350 |
| 1517049 | 6244 | 6259 | 1146 | 1161 | CTTCGGCGTTCAGTGA | 43 | 2351 |
| 1517058 | 6324 | 6339 | 1226 | 1241 | TGGGGCGGGGACAGGG | 48 | 2352 |
| 1517064 | 5053 | 5068 | N/A | N/A | GAACCAGCAGAGACCC | 48† | 2353 |
| 1517072 | 3187 | 3202 | N/A | N/A | CAATCGACGGCTAGCT | 76 | 2354 |
| 1517080 | 4302 | 4317 | N/A | N/A | GCGGAAAAGCATGTAT | 82 | 2355 |
| 1517098 | 3236 | 3251 | N/A | N/A | GCGCCGTGTTCCATTT | 90 | 2356 |
| 1517102 | 3179 | 3194 | N/A | N/A | GGCTAGCTACCGTGTC | 86 | 2357 |
| 1517108 | 6268 | 6283 | 1170 | 1185 | GGCGTGGGGTCGCATG | 32 | 2358 |
| 1517113 | 5619 | 5634 | 521 | 536 | TTGGACAGCCGTGCCC | 80 | 2359 |
| 1517117 | 3262 | 3277 | N/A | N/A | ATTCTAAGCTCCAACC | 71 | 2360 |
| 1517120 | 6348 | 6363 | 1250 | 1265 | TAGGGTCCACCCCAGG | 35 | 2361 |
| 1517121 | 6276 | 6291 | 1178 | 1193 | CACGGGGTGGCGTGGG | 47 | 2362 |
| 1517122 | 2934 | 2949 | N/A | N/A | ACCCCGAGTAGCTCTC | 65 | 2363 |
| 1517128 | 4177 | 4192 | N/A | N/A | TCTAACTCCCAGCCAG | 109 | 2364 |
| 1517130 | 6365 | 6380 | 1267 | 1282 | GTGAATCTTTATTAAA | 20 | 1982 |
| 1517132 | 6169 | 6184 | 1071 | 1086 | CCCGGCCCACTGGCGC | 98 | 2365 |
| 1517136 | 4851 | 4866 | 333 | 348 | GCGACCCAGTGCCAGT | 27† | 2366 |
| 1517140 | 3435 | 3450 | N/A | N/A | AACCCATTCCCTATTT | 108 | 2367 |

TABLE 37
Reduction of APOE RNA by 3-10-3 cEt gapmers
with mixed PO/PS internucleoside linkages at a
concentration of 4000 nM in Hep3B cells plated
at 20,000 cells per well

| | SEQ | SEQ | SEQ | SEQ | | | |
|---|---|---|---|---|---|---|---|
| | ID No: | ID No: | ID No: | ID No: | | | |
| | 1 | 1 | 2 | 2 | | APOE | |
| Compound | Start | Stop | Start | Stop | Sequence | (% | SEQ |
| Number | Site | Site | Site | Site | (5′ to 3′) | UTC) | ID NO |
| 1335667 | 3575 | 3590 | N/A | N/A | GAAACTGTCAATCAAC | 113 | 2368 |
| 1335670 | 3793 | 3808 | N/A | N/A | TCAAATCGCTGTTCAG | 91 | 2369 |
| 1335672 | 6355 | 6370 | 1257 | 1272 | ATTAAACTAGGGTCCA | 24 | 2370 |
| 1516524 | 4737 | 4752 | N/A | N/A | GAACAAGTTCAAGGTG | 77 | 2371 |
| 1516544 | 3313 | 3328 | N/A | N/A | ACCGCCGGTTCCATCT | 53 | 2372 |
| 1516562 | 5775 | 5790 | 677 | 692 | CGCTTACGCAGCTTGC | 93 | 2373 |
| 1516572 | 5834 | 5849 | 736 | 751 | GGGCCCCGGCCTGGTA | 107 | 2374 |
| 1516577 | 3216 | 3231 | N/A | N/A | GCTAATTCAGTCCTCA | 74 | 2375 |
| 1516583 | 5091 | 5106 | N/A | N/A | AGCTAAAGCCAGGAGT | 90† | 2376 |
| 1516590 | 2933 | 2948 | N/A | N/A | CCCCGAGTAGCTCTCC | 94 | 2377 |
| 1516601 | 6275 | 6290 | 1177 | 1192 | ACGGGGTGGCGTGGGG | 79 | 2378 |
| 1516608 | 5798 | 5813 | 700 | 715 | GGTCATCGGCATCGCG | 50 | 2379 |
| 1516617 | 6363 | 6378 | 1265 | 1280 | GAATCTTTATTAAACT | 12 | 2380 |
| 1516619 | 2831 | 2846 | 83 | 98 | CTCACCGGCTCCTGGG | 86 | 2381 |
| 1516622 | 3564 | 3579 | N/A | N/A | TCAACCGCCAGTGAGG | 93 | 2382 |
| 1516631 | 3473 | 3488 | N/A | N/A | CAACAGCCTAATCCCA | 83 | 2383 |
| 1516634 | 5992 | 6007 | 894 | 909 | CTCCATCCGCGCGCGC | 94 | 2384 |
| 1516635 | 4866 | 4881 | 348 | 363 | CAGGTAATCCCAAAAG | 63† | 2385 |
| 1516636 | 5977 | 5992 | 879 | 894 | CAGCCGCTCGCCCCAG | 102 | 2386 |
| 1516637 | 6134 | 6149 | 1036 | 1051 | GCTCGAACCAGCTCTT | 66 | 2387 |
| 1516639 | 5740 | 5755 | 642 | 657 | CACCCGCAGCTCCTCG | 89 | 2388 |
| 1516640 | 6331 | 6346 | 1233 | 1248 | GGACGGCTGGGGCGGG | 78 | 2389 |
| 1516643 | 5656 | 5671 | 558 | 573 | GTCCGCGCCCAGCCGG | 80 | 2390 |
| 1516650 | 3454 | 3469 | N/A | N/A | CATTTACCAAGCCGCC | 80 | 2391 |
| 1516651 | 3658 | 3673 | N/A | N/A | CCATACCTGCCAGGAA | 80 | 2392 |
| 1516652 | 6307 | 6322 | 1209 | 1224 | CTCCCGCTGCAGGCTG | 26 | 2393 |
| 1516664 | 3494 | 3509 | N/A | N/A | CAAGCCTTGTTGCATT | 79 | 2394 |
| 1516683 | 3177 | 3192 | N/A | N/A | CTAGCTACCGTGTCGC | 92 | 2395 |
| 1516685 | 6323 | 6338 | 1225 | 1240 | GGGGCGGGGACAGGGT | 114 | 2396 |
| 1516689 | 3360 | 3375 | N/A | N/A | CATCTTCCTCTCCCGG | 86 | 2397 |
| 1516698 | 2855 | 2870 | 107 | 122 | ATCCCCGTGCCCCCGA | 108 | 2398 |
| 1516711 | 2965 | 2980 | N/A | N/A | CTCACCCCCGCTCCTC | 89 | 2399 |
| 1516719 | 3421 | 3436 | N/A | N/A | TTAACTCCCTCCTGGT | 111 | 2400 |
| 1516720 | 3186 | 3201 | N/A | N/A | AATCGACGGCTAGCTA | 88 | 2401 |
| 1516722 | 3836 | 3851 | N/A | N/A | AACTCCTATCTCAAGG | 96 | 2402 |
| 1516724 | 6283 | 6298 | 1185 | 1200 | CAGGAGGCACGGGGTG | 65 | 2403 |
| 1516725 | 3228 | 3243 | N/A | N/A | TTCCATTTATGAGCTA | 70 | 2404 |
| 1516727 | 5913 | 5928 | 815 | 830 | GCGGCCCGCACGCGGC | 102 | 2405 |
| 1516733 | 5617 | 5632 | 519 | 534 | GGACAGCCGTGCCCGC | 80 | 2406 |
| 1516739 | 5694 | 5709 | 596 | 611 | CCGCGGTACTGCACCA | 105 | 2407 |
| 1516752 | 5904 | 5919 | 806 | 821 | ACGCGGCCCTGTTCCA | 93 | 2408 |
| 1516766 | 3524 | 3539 | N/A | N/A | CCAACCCGGCCTCACC | 92 | 2409 |
| 1516776 | 3676 | 3691 | N/A | N/A | ACCGAGCAAGCCCCGC | 132 | 2410 |
| 1516798 | 3434 | 3449 | N/A | N/A | ACCCATTCCCTATTTA | 117 | 2411 |
| 1516801 | 3103 | 3118 | N/A | N/A | CGATAAATGATAGTGA | 77 | 2412 |
| 1516816 | 4858 | 4873 | 340 | 355 | CCCAAAAGCGACCCAG | 14† | 2413 |
| 1516820 | 4301 | 4316 | N/A | N/A | CGGAAAAGCATGTATT | 88 | 2414 |
| 1516821 | 5515 | 5530 | N/A | N/A | GCGGCCGAGAGGGCGG | 109† | 2415 |
| 1516833 | 4193 | 4208 | N/A | N/A | CAATGCATTAGAAACC | 88 | 2416 |
| 1516839 | 6259 | 6274 | 1161 | 1176 | TCGCATGGCTGCAGGC | 10 | 2417 |
| 1516849 | 3446 | 3461 | N/A | N/A | AAGCCGCCCCCAACCC | 96 | 2418 |
| 1516852 | 3065 | 3080 | N/A | N/A | GCTTACATCCCAGTCC | 128 | 2419 |
| 1516853 | 6291 | 6306 | 1193 | 1208 | CGCGGAGGCAGGAGGC | 53 | 2420 |
| 1516855 | 4980 | 4995 | N/A | N/A | GCCGCCCACCAGGAGG | 98† | 2421 |
| 1516856 | 4989 | 5004 | N/A | N/A | GGAGGTATAGCCGCCC | 97† | 2422 |
| 1516859 | 2917 | 2932 | N/A | N/A | TGAGACTACCTGGAGG | 95 | 2423 |
| 1516872 | 5029 | 5044 | N/A | N/A | CAAGACTTAGCGACAG | 71† | 2424 |
| 1516878 | 3636 | 3651 | 210 | 225 | CAGCAACGCAGCCCAC | 68 | 2425 |
| 1516894 | 6339 | 6354 | 1241 | 1256 | CCCCAGGAGGACGGCT | 92 | 2426 |
| 1516910 | 3508 | 3523 | N/A | N/A | CCAGGTTAGCCTTCCA | 92 | 2427 |
| 1516918 | 6235 | 6250 | 1137 | 1152 | TCAGTGATTGTCGCTG | 70 | 2428 |
| 1516919 | 6347 | 6362 | 1249 | 1264 | AGGGTCCACCCCAGGA | 82 | 2429 |
| 1516920 | 2941 | 2956 | N/A | N/A | AAGCCCGACCCCGAGT | 110 | 2430 |
| 1516927 | 6112 | 6127 | 1014 | 1029 | GGCCTGGAAGGCCTCG | 92 | 2431 |
| 1516944 | 6315 | 6330 | 1217 | 1232 | GACAGGGTCTCCCGCT | 28 | 2432 |
| 1516971 | 6251 | 6266 | 1153 | 1168 | CTGCAGGCTTCGGCGT | 78 | 2433 |
| 1516995 | 5038 | 5053 | N/A | N/A | CAGGCCCCCCAAGACT | 104† | 2434 |
| 1516999 | 4543 | 4558 | N/A | N/A | GCGGCCTGAACATGGT | 94 | 2435 |
| 1517003 | 6372 | 6387 | 1274 | 1289 | AAACTTGGTGAATCTT | 26 | 2436 |
| 1517004 | 3261 | 3276 | N/A | N/A | TTCTAAGCTCCAACCT | 89 | 2437 |
| 1517011 | 6299 | 6314 | 1201 | 1216 | GCAGGCTGCGCGGAGG | 38 | 2438 |
| 1517013 | 4175 | 4190 | N/A | N/A | TAACTCCCAGCCAGGT | 121 | 2439 |
| 1517026 | 6267 | 6282 | 1169 | 1184 | GCGTGGGGTCGCATGG | 15 | 2440 |
| 1517041 | 4693 | 4708 | N/A | N/A | CATCTAGTACCTAGGG | 88 | 2441 |
| 1517097 | 6243 | 6258 | 1145 | 1160 | TTCGGCGTTCAGTGAT | 57 | 2442 |
| 1517115 | 4850 | 4865 | 332 | 347 | CGACCCAGTGCCAGTT | 98† | 2443 |
| 1517125 | 2876 | 2891 | 128 | 143 | TTTCTAGAGGCCCCTG | 75 | 2444 |
| 1517130 | 6365 | 6380 | 1267 | 1282 | GTGAATCTTTATTAAA | 34 | 1982 |

TABLE 38
Reduction of APOE RNA by 3-10-3 cEt gapmers
with mixed PO/PS internucleoside linkages at a
concentration of 4000 nM in Hep3B cells plated
at 20,000 cells per well

| | SEQ | SEQ | SEQ | SEQ | | | |
|---|---|---|---|---|---|---|---|
| | ID No: | ID No: | ID No: | ID No: | | | |
| | 1 | 1 | 2 | 2 | | APOE | |
| Compound | Start | Stop | Start | Stop | Sequence | (% | SEQ |
| Number | Site | Site | Site | Site | (5′ to 3′) | UTC) | ID NO |
| 1335665 | 5028 | 5043 | N/A | N/A | AAGACTTAGCGACAGG | 89† | 2445 |
| 1335683 | 4191 | 4206 | N/A | N/A | ATGCATTAGAAACCTC | 95 | 2446 |
| 1516526 | 6322 | 6337 | 1224 | 1239 | GGGCGGGGACAGGGTC | 61 | 2447 |
| 1516530 | 3492 | 3507 | N/A | N/A | AGCCTTGTTGCATTAT | 95 | 2448 |
| 1516533 | 6371 | 6386 | 1273 | 1288 | AACTTGGTGAATCTTT | 45 | 2449 |
| 1516546 | 4673 | 4688 | N/A | N/A | ACAGAAGGTGCTCCAC | 110 | 2450 |
| 1516549 | 6362 | 6377 | 1264 | 1279 | AATCTTTATTAAACTA | 43 | 2451 |
| 1516554 | 3258 | 3273 | N/A | N/A | TAAGCTCCAACCTCAC | 76 | 2452 |
| 1516557 | 5572 | 5587 | 474 | 489 | CTCCAGTTCCGATTTG | 70 | 2453 |
| 1516565 | 5976 | 5991 | 878 | 893 | AGCCGCTCGCCCCAGG | 118 | 2454 |
| 1516566 | 3792 | 3807 | N/A | N/A | CAAATCGCTGTTCAGA | 102 | 2455 |
| 1516580 | 5037 | 5052 | N/A | N/A | AGGCCCCCCAAGACTT | 111† | 2456 |
| 1516584 | 3657 | 3672 | N/A | N/A | CATACCTGCCAGGAAT | 108 | 2457 |
| 1516585 | 5693 | 5708 | 595 | 610 | CGCGGTACTGCACCAG | 94 | 2458 |
| 1516586 | 4128 | 4143 | N/A | N/A | TGGGAGATCGAAACGG | 90 | 2459 |
| 1516605 | 3574 | 3589 | N/A | N/A | AAACTGTCAATCAACC | 113 | 2460 |
| 1516626 | 6234 | 6249 | 1136 | 1151 | CAGTGATTGTCGCTGG | 54 | 2461 |
| 1516628 | 6266 | 6281 | 1168 | 1183 | CGTGGGGTCGCATGGC | 18 | 2462 |
| 1516647 | 2916 | 2931 | N/A | N/A | GAGACTACCTGGAGGC | 108 | 2463 |
| 1516648 | 5833 | 5848 | 735 | 750 | GGCCCCGGCCTGGTAC | 116 | 2464 |
| 1516665 | 5990 | 6005 | 892 | 907 | CCATCCGCGCGCGCAG | 65 | 2465 |
| 1516669 | 3835 | 3850 | N/A | N/A | ACTCCTATCTCAAGGA | 104 | 2466 |
| 1516676 | 3176 | 3191 | N/A | N/A | TAGCTACCGTGTCGCT | 99 | 2467 |
| 1516699 | 6133 | 6148 | 1035 | 1050 | CTCGAACCAGCTCTTG | 92 | 2468 |
| 1516701 | 6250 | 6265 | 1152 | 1167 | TGCAGGCTTCGGCGTT | 51 | 2469 |
| 1516702 | 6242 | 6257 | 1144 | 1159 | TCGGCGTTCAGTGATT | 72 | 2470 |
| 1516705 | 3312 | 3327 | N/A | N/A | CCGCCGGTTCCATCTC | 87 | 2471 |
| 1516714 | 3635 | 3650 | 209 | 224 | AGCAACGCAGCCCACA | 71 | 2472 |
| 1516738 | 6314 | 6329 | 1216 | 1231 | ACAGGGTCTCCCGCTG | 70 | 2473 |
| 1516751 | 6330 | 6345 | 1232 | 1247 | GACGGCTGGGGCGGGG | 119 | 2474 |
| 1516754 | 2805 | 2820 | 57 | 72 | CTTCACCTCCGCTGGG | 94 | 2475 |
| 1516764 | 3472 | 3487 | N/A | N/A | AACAGCCTAATCCCAG | 40 | 2476 |
| 1516767 | 3432 | 3447 | N/A | N/A | CCATTCCCTATTTAAC | 117 | 2477 |
| 1516804 | 3445 | 3460 | N/A | N/A | AGCCGCCCCCAACCCA | 108 | 2478 |
| 1516813 | 5912 | 5927 | 814 | 829 | CGGCCCGCACGCGGCC | 111 | 2479 |
| 1516826 | 3341 | 3356 | N/A | N/A | TCAAATTCCATCCCCC | 85 | 2480 |
| 1516831 | 6306 | 6321 | 1208 | 1223 | TCCCGCTGCAGGCTGC | 56 | 2481 |
| 1516835 | 2854 | 2869 | 106 | 121 | TCCCCGTGCCCCCGAC | 111 | 2482 |
| 1516868 | 6338 | 6353 | 1240 | 1255 | CCCAGGAGGACGGCTG | 89 | 2483 |
| 1516870 | 3420 | 3435 | N/A | N/A | TAACTCCCTCCTGGTC | 101 | 2484 |
| 1516874 | 3507 | 3522 | N/A | N/A | CAGGTTAGCCTTCCAA | 106 | 2485 |
| 1516877 | 6258 | 6273 | 1160 | 1175 | CGCATGGCTGCAGGCT | 35 | 2486 |
| 1516879 | 5739 | 5754 | 641 | 656 | ACCCGCAGCTCCTCGG | 104 | 2487 |
| 1516883 | 4233 | 4248 | N/A | N/A | GATCACAGCTGCCCCG | 112 | 2488 |
| 1516889 | 4979 | 4994 | N/A | N/A | CCGCCCACCAGGAGGG | 104† | 2489 |
| 1516891 | 6354 | 6369 | 1256 | 1271 | TTAAACTAGGGTCCAC | 48 | 2490 |
| 1516895 | 5090 | 5105 | N/A | N/A | GCTAAAGCCAGGAGTC | 107† | 2491 |
| 1516898 | 3453 | 3468 | N/A | N/A | ATTTACCAAGCCGCCC | 115 | 2492 |
| 1516901 | 6298 | 6313 | 1200 | 1215 | CAGGCTGCGCGGAGGC | 46 | 2493 |
| 1516905 | 3097 | 3112 | N/A | N/A | ATGATAGTGACAACTC | 79 | 2494 |
| 1516926 | 2875 | 2890 | 127 | 142 | TTCTAGAGGCCCCTGA | 104 | 2495 |
| 1516941 | 4988 | 5003 | N/A | N/A | GAGGTATAGCCGCCCA | 119† | 2496 |
| 1516945 | 6274 | 6289 | 1176 | 1191 | CGGGGTGGCGTGGGGT | 122 | 2497 |
| 1516967 | 3185 | 3200 | N/A | N/A | ATCGACGGCTAGCTAC | 108 | 2498 |
| 1516980 | 6282 | 6297 | 1184 | 1199 | AGGAGGCACGGGGTGG | 78 | 2499 |
| 1516997 | 5344 | 5359 | N/A | N/A | GCAGAGACGAAGAAGG | 89† | 2500 |
| 1517007 | 2949 | 2964 | N/A | N/A | CTCTCCCCAAGCCCGA | 86 | 2501 |
| 1517008 | 3557 | 3572 | N/A | N/A | CCAGTGAGGACTCCTC | 123 | 2502 |
| 1517012 | 5787 | 5802 | 689 | 704 | TCGCGGAGGAGCCGCT | 99 | 2503 |
| 1517028 | 5773 | 5788 | 675 | 690 | CTTACGCAGCTTGCGC | 99 | 2504 |
| 1517032 | 6111 | 6126 | 1013 | 1028 | GCCTGGAAGGCCTCGG | 104 | 2505 |
| 1517035 | 2940 | 2955 | N/A | N/A | AGCCCGACCCCGAGTA | 104 | 2506 |
| 1517045 | 2932 | 2947 | N/A | N/A | CCCGAGTAGCTCTCCT | 108 | 2507 |
| 1517051 | 3674 | 3689 | N/A | N/A | CGAGCAAGCCCCGCCC | 131 | 2508 |
| 1517055 | 5648 | 5663 | 550 | 565 | CCAGCCGGGCCTGCGC | 90 | 2509 |
| 1517067 | 4857 | 4872 | 339 | 354 | CCAAAAGCGACCCAGT | 23† | 2510 |
| 1517070 | 6290 | 6305 | 1192 | 1207 | GCGGAGGCAGGAGGCA | 81 | 2511 |
| 1517071 | 6346 | 6361 | 1248 | 1263 | GGGTCCACCCCAGGAG | 107 | 2512 |
| 1517087 | 5903 | 5918 | 805 | 820 | CGCGGCCCTGTTCCAC | 58 | 2513 |
| 1517089 | 3198 | 3213 | N/A | N/A | TTAAAGTTCTCCAATC | 92 | 2514 |
| 1517090 | 3064 | 3079 | N/A | N/A | CTTACATCCCAGTCCA | 97 | 2515 |
| 1517092 | 3523 | 3538 | N/A | N/A | CAACCCGGCCTCACCC | 129 | 2516 |
| 1517093 | 4842 | 4857 | 324 | 339 | TGCCAGTTCCCAGCGC | 177 | 2517 |
| 1517096 | 4865 | 4880 | 347 | 362 | AGGTAATCCCAAAAGC | 87† | 2518 |
| 1517103 | 3227 | 3242 | N/A | N/A | TCCATTTATGAGCTAA | 112 | 2519 |
| 1517127 | 4542 | 4557 | N/A | N/A | CGGCCTGAACATGGTT | 114 | 2520 |
| 1517130 | 6365 | 6380 | 1267 | 1282 | GTGAATCTTTATTAAA | 34 | 1982 |
| 1517139 | 4707 | 4722 | N/A | N/A | TGACCCCGTCCAGGCA | 110 | 2521 |

### Example 5: Dose-Dependent Inhibition of Human APOE in HepG2 Cells by Modified Oligonucleotides

[0714] Modified oligonucleotides selected from Examples 1-4 above were tested at various doses in HepG2 cells. Cultured HepG2 cells at a density of 10,000 cells per well were treated by Lipofectin with various concentrations of modified oligonucleotide as specified in the tables below. After a treatment period of approximately 24 hours, total RNA was isolated from the cells and APOE RNA levels were measured by quantitative real-time RTPCR. Human APOE primer-probe set RTS3073 (described herein in Example 1) was used to measure RNA levels as described above. APOE RNA levels were normalized to total RNA content, as measured by RIBOGREEN®. Results are presented in the tables below as percent APOE RNA, relative to untreated control cells (% UTC). Modified oligonucleotides marked with an “†” indicate that the modified oligonucleotide is complementary to the amplicon region of the primer probe set. Additional assays may be used to measure the potency and efficacy of the modified oligonucleotides complementary to the amplicon region.

[0715] The half maximal inhibitory concentration (IC₅₀) of each modified oligonucleotide was calculated using a linear regression on a log/linear plot of the data in Excel and is also presented in the tables below.

TABLE 39
Dose-dependent reduction of human APOE RNA
in HepG2 cells by modified oligonucleotides

| | APOE RNA (% UTC) | | | | | | |
|---|---|---|---|---|---|---|---|
| Compound | 6.25 | 12.5 | 25 | 50 | 100 | 200 | IC₅₀ |
| No. | nM | nM | nM | nM | nM | nM | (μM) |
| 426010† | 130 | 117 | 108 | 81 | 48 | 38 | 0.14 |
| 426011† | 124 | 113 | 96 | 71 | 29 | 24 | 0.08 |
| 426013† | 84 | 76 | 52 | 24 | 7 | 5 | 0.03 |
| 426017† | 100 | 98 | 66 | 38 | 14 | 12 | 0.04 |
| 426020 | 142 | 123 | 114 | 92 | 55 | 54 | >0.2 |
| 426028 | 128 | 117 | 98 | 69 | 47 | 39 | 0.12 |
| 426047 | 124 | 121 | 120 | 108 | 60 | 53 | >0.2 |
| 426048 | 107 | 104 | 70 | 57 | 50 | 32 | 0.09 |
| 426049 | 121 | 119 | 109 | 80 | 59 | 40 | 0.16 |
| 426055 | 120 | 112 | 105 | 86 | 83 | 60 | >0.2 |

### Example 6: Dose-Dependent Inhibition of Human APOE in Hep3B Cells by Modified Oligonucleotides

[0716] Modified oligonucleotides selected from Examples 1˜4 above were tested at various doses in Hep3B cells. Cultured Hep3B cells at a density of 20,000 cells per well were treated by electroporation with various concentrations of modified oligonucleotide as specified in the tables below. After a treatment period of approximately 24 hours, total RNA was isolated from the cells and APOE RNA levels were measured by quantitative real-time RTPCR. Human APOE primer-probe set RTS3073 (described herein in Example 1) was used to measure RNA levels as described above. APOE RNA levels were normalized to total RNA content, as measured by RIBOGREEN®. Reduction of APOE RNA is presented in the tables below as percent APOE RNA, relative to untreated control cells (% UTC). Modified oligonucleotides marked with an “f” indicate that the modified oligonucleotide is complementary to the amplicon region of the primer probe set. Additional assays may be used to measure the potency and efficacy of the modified oligonucleotides complementary to the amplicon region.

[0717] The half maximal inhibitory concentration (IC₅₀) of each modified oligonucleotide was calculated using a linear regression on a log/linear plot of the data in Excel and is also presented in the tables below.

TABLE 40
Dose-dependent reduction of human APOE RNA
in Hep3B cells by modified oligonucleotides

| Compound | APOE RNA (% UTC) | | | | | IC₅₀ |
|---|---|---|---|---|---|---|
| No. | 62 nM | 185 nM | 556 nM | 1667 nM | 5000 nM | (μM) |
| 426048 | 116 | 85 | 57 | 38 | 24 | 1.10 |
| 688999 | 137 | 131 | 151 | 100 | 79 | >5 |
| 689003 | 115 | 109 | 92 | 69 | 48 | 5.68 |
| 689009 | 117 | 136 | 126 | 78 | 72 | >5 |
| 689013 | 112 | 63 | 54 | 64 | 18 | 1.13 |
| 689014 | 97 | 122 | 67 | 44 | 19 | 1.40 |
| 689015 | 99 | 50 | 32 | 30 | 12 | 0.41 |
| 689016 | 131 | 75 | 54 | 58 | 38 | 1.72 |
| 689017 | 145 | 98 | 82 | 71 | 26 | 2.29 |
| 689023 | 132 | 172 | 116 | 84 | 53 | >5 |
| 689027 | 115 | 99 | 100 | 65 | 66 | >5 |
| 689028 | 123 | 96 | 102 | 68 | 29 | 3.11 |
| 689029 | 136 | 114 | 99 | 75 | 56 | >5 |
| 689040 | 135 | 121 | 93 | 103 | 74 | >5 |
| 689042 | 124 | 133 | 110 | 93 | 66 | >5 |

TABLE 41
Dose-dependent reduction of human APOE RNA
in Hep3B cells by modified oligonucleotides

| Compound | APOE RNA (% UTC) | | | | IC₅₀ |
|---|---|---|---|---|---|
| No. | 185 nM | 556 nM | 1667 nM | 5000 nM | (μM) |
| 426048 | 71 | 72 | 41 | 15 | 0.94 |
| 688711 | 184 | 226 | 167 | 132 | >5 |
| 688848 | 77 | 94 | 97 | 73 | >5 |
| 688886 | 82 | 103 | 108 | 66 | >5 |
| 689015 | 55 | 31 | 15 | 9 | 0.19 |
| 689016 | 71 | 62 | 50 | 22 | 1.06 |
| 689029 | 73 | 71 | 64 | 39 | 3.22 |
| 689043 | 65 | 57 | 38 | 12 | 0.63 |
| 689044 | 135 | 101 | 53 | 31 | 2.42 |
| 689046 | 58 | 32 | 26 | 15 | 0.24 |
| 689047 | 92 | 91 | 72 | 50 | >5 |
| 689048 | 53 | 31 | 25 | 13 | 0.17 |
| 689049 | 99 | 76 | 35 | 32 | 1.55 |
| 689050 | 75 | 69 | 18 | 15 | 0.73 |
| 689051 | 61 | 39 | 29 | 14 | 0.34 |
| 689090† | 92 | 116 | 110 | 92 | >5 |
| 689102† | 100 | 138 | 98 | 85 | >5 |
| 689110 | 95 | 96 | 78 | 83 | >5 |
| 689118 | 67 | 49 | 29 | 8 | 0.50 |

TABLE 42
Dose-dependent reduction of human APOE RNA
in Hep3B cells by modified oligonucleotides

| Compound | APOE RNA (% UTC) | | | | IC₅₀ |
|---|---|---|---|---|---|
| No. | 78.125 nM | 312.5 nM | 1250 nM | 5000 nM | (μM) |
| 1516537† | 46 | 31 | 19 | 11 | <0.08 |
| 1516553 | 63 | 46 | 17 | 19 | 0.19 |
| 1516570 | 71 | 56 | 33 | 23 | 0.43 |
| 1516613 | 35 | 21 | 8 | 3 | <0.08 |
| 1516617 | 84 | 54 | 30 | 16 | 0.49 |
| 1516620 | 76 | 59 | 33 | 15 | 0.46 |
| 1516715 | 74 | 58 | 29 | 11 | 0.41 |
| 1516750 | 72 | 62 | 33 | 11 | 0.44 |
| 1516758 | 44 | 26 | 25 | 26 | <0.08 |
| 1516771 | 82 | 46 | 32 | 17 | 0.43 |
| 1516828 | 64 | 43 | 20 | 15 | 0.19 |
| 1516834 | 51 | 32 | 26 | 30 | <0.08 |
| 1516839 | 56 | 41 | 17 | 14 | 0.12 |
| 1516866 | 59 | 42 | 18 | 10 | 0.15 |
| 1516871† | 29 | 16 | 10 | 7 | <0.08 |
| 1516931 | 101 | 58 | 29 | 21 | 0.71 |
| 1516937† | 40 | 18 | 6 | 5 | <0.08 |
| 1517136† | 69 | 51 | 34 | 24 | 0.37 |
| 1517427 | 95 | 50 | 25 | 27 | 0.60 |

TABLE 43
Dose-dependent reduction of human APOE RNA
in Hep3B cells by modified oligonucleotides

| Compound | APOE RNA (% UTC) | | | | IC₅₀ |
|---|---|---|---|---|---|
| No. | 78.125 nM | 312.5 nM | 1250 nM | 5000 nM | (μM) |
| 689043 | 76 | 55 | 35 | 18 | 0.47 |
| 708021 | 84 | 50 | 28 | 14 | 0.45 |
| 1335661 | 78 | 65 | 34 | 14 | 0.55 |
| 1335672 | 82 | 56 | 25 | 12 | 0.44 |
| 1516555 | 73 | 40 | 33 | 15 | 0.29 |
| 1516628 | 71 | 46 | 29 | 11 | 0.29 |
| 1516652 | 70 | 57 | 41 | 17 | 0.47 |
| 1516672 | 72 | 53 | 35 | 25 | 0.45 |
| 1516816† | 24 | 13 | 11 | 5 | <0.08 |
| 1516862 | 62 | 43 | 19 | 11 | 0.17 |
| 1516944 | 70 | 51 | 36 | 13 | 0.36 |
| 1517003 | 44 | 38 | 25 | 25 | <0.08 |
| 1517026 | 33 | 19 | 10 | 5 | <0.08 |
| 1517067† | 54 | 35 | 21 | 10 | 0.10 |
| 1517123 | 96 | 73 | 44 | 26 | 1.10 |
| 1517427 | 75 | 60 | 32 | 10 | 0.44 |
| 1517437† | 28 | 13 | 4 | 4 | <0.08 |
| 1517532 | 66 | 37 | 25 | 11 | 0.19 |
| 1517578 | 79 | 62 | 52 | 15 | 0.72 |

TABLE 44
Dose-dependent reduction of human APOE RNA
in Hep3B cells by modified oligonucleotides

| Compound | APOE RNA (% UTC) | | | | IC₅₀ |
|---|---|---|---|---|---|
| No. | 78.125 nM | 312.5 nM | 1250 nM | 5000 nM | (μM) |
| 1516539 | 86 | 65 | 36 | 19 | 0.68 |
| 1516559 | 81 | 55 | 31 | 21 | 0.51 |
| 1516607 | 96 | 67 | 38 | 22 | 0.87 |
| 1516658 | 50 | 31 | 14 | 11 | <0.08 |
| 1516740 | 31 | 20 | 17 | 27 | <0.08 |
| 1516778 | 51 | 26 | 18 | 5 | <0.08 |
| 1516794 | 91 | 62 | 33 | 22 | 0.70 |
| 1516881 | 82 | 38 | 45 | 24 | 0.50 |
| 1516886 | 99 | 78 | 45 | 28 | 1.28 |
| 1516890 | 56 | 58 | 26 | 11 | 0.23 |
| 1516932 | 45 | 30 | 23 | 23 | <0.08 |
| 1516936 | 75 | 57 | 32 | 16 | 0.44 |
| 1516974 | 66 | 46 | 23 | 30 | 0.25 |
| 1517024 | 27 | 25 | 23 | 23 | <0.08 |
| 1517029 | 72 | 57 | 30 | 23 | 0.43 |
| 1517063 | 72 | 39 | 28 | 27 | 0.28 |
| 1517130 | 94 | 76 | 46 | 34 | 1.43 |
| 1517131 | 88 | 60 | 36 | 23 | 0.70 |
| 1517427 | 89 | 66 | 36 | 29 | 0.87 |

TABLE 45
Dose-dependent reduction of human APOE RNA
in Hep3B cells by modified oligonucleotides

| Compound | APOE RNA (% UTC) | | | | IC₅₀ |
|---|---|---|---|---|---|
| No. | 78.125 nM | 312.5 nM | 1250 nM | 5000 nM | (μM) |
| 942586 | 78 | 52 | 25 | 12 | 0.38 |
| 1516589 | 80 | 79 | 51 | 33 | 1.53 |
| 1516824 | 89 | 94 | 92 | 93 | >5 |
| 1516892 | 87 | 95 | 87 | 88 | >5 |
| 1517016 | 96 | 89 | 71 | 51 | >5 |
| 1517130 | 89 | 73 | 46 | 23 | 1.00 |
| 1517180 | 91 | 75 | 53 | 31 | 1.47 |
| 1517383 | 71 | 45 | 21 | 9 | 0.26 |
| 1517427 | 85 | 57 | 29 | 15 | 0.52 |
| 1517529† | 33 | 17 | 13 | 9 | <0.08 |
| 1517535 | 80 | 53 | 29 | 21 | 0.46 |
| 1517574 | 93 | 73 | 48 | 30 | 1.29 |
| 1517746† | 84 | 57 | 32 | 18 | 0.54 |
| 1517770 | 56 | 26 | 18 | 5 | 0.08 |
| 1517807† | 63 | 30 | 20 | 14 | 0.12 |
| 1517837 | 52 | 32 | 29 | 25 | <0.08 |
| 1517849 | 66 | 49 | 32 | 27 | 0.33 |
| 1517853 | 73 | 56 | 28 | 16 | 0.39 |
| 1517885 | 79 | 58 | 33 | 18 | 0.52 |

TABLE 46
Dose-dependent reduction of human APOE RNA
in Hep3B cells by modified oligonucleotides

| Compound | APOE RNA (% UTC) | | | | IC₅₀ |
|---|---|---|---|---|---|
| No. | 78.125 nM | 312.5 nM | 1250 nM | 5000 nM | (μM) |
| 708024 | 46 | 25 | 26 | 20 | <0.08 |
| 942588 | 82 | 57 | 31 | 25 | 0.57 |
| 1516623† | 74 | 44 | 20 | 9 | 0.27 |
| 1516646 | 87 | 65 | 37 | 23 | 0.76 |
| 1516656 | 73 | 46 | 16 | 11 | 0.27 |
| 1516681 | 77 | 42 | 27 | 24 | 0.35 |
| 1516709† | 68 | 50 | 28 | 9 | 0.29 |
| 1517082 | 66 | 32 | 16 | 9 | 0.15 |
| 1517085 | 77 | 46 | 17 | 9 | 0.30 |
| 1517130 | 88 | 66 | 45 | 22 | 0.87 |
| 1517208 | 100 | 79 | 75 | 45 | 4.89 |
| 1517220 | 80 | 47 | 30 | 17 | 0.41 |
| 1517269† | 48 | 32 | 20 | 12 | <0.08 |
| 1517427 | 81 | 52 | 27 | 13 | 0.42 |
| 1517508 | 67 | 50 | 25 | 15 | 0.28 |
| 1517736† | 77 | 73 | 53 | 25 | 1.07 |
| 1517841 | 86 | 72 | 64 | 34 | 2.02 |
| 1517863† | 39 | 24 | 20 | 14 | <0.08 |
| 1517874 | 81 | 51 | 29 | 29 | 0.52 |

### Example 7: Dose-Dependent Inhibition of Human APOE in Hep3B Cells by Modified Oligonucleotides

[0718] Modified oligonucleotides selected from Examples 1˜4 above were tested at various doses in Hep3B cells. Cultured Hep3B cells at a density of 20,000 cells per well were treated by electroporation with various concentrations of modified oligonucleotide as specified in the tables below. After a treatment period of approximately 24 hours, total RNA was isolated from the cells and APOE RNA levels were measured by quantitative real-time RTPCR. Human APOE primer-probe set RTS4652 (forward sequence CGCCTGGACGAGGTGAAG, designated herein as SEQ ID NO: 13; reverse sequence CCACTGGCGCTGCATGT, designated herein as SEQ ID NO: 14; probe sequence TTCCAGGCCCGCCTCAAGAGC, designated herein as SEQ ID NO: 15) was used to measure RNA levels as described above. APOE RNA levels were normalized to total RNA content, as measured by RIBOGREEN®. Reduction of APOE RNA is presented in the tables below as percent APOE RNA, relative to untreated control cells (% UTC). Modified oligonucleotides marked with an “†” indicate that the modified oligonucleotide is complementary to the amplicon region of the primer probe set. Additional assays may be used to measure the potency and efficacy of the modified oligonucleotides complementary to the amplicon region.

[0719] The half maximal inhibitory concentration (IC₅₀) of each modified oligonucleotide was calculated using a linear regression on a log/linear plot of the data in Excel and is also presented in the tables below.

TABLE 47
Dose-dependent reduction of human APOE RNA
in Hep3B cells by modified oligonucleotides

| Compound | APOE RNA (% UTC) | | | | IC₅₀ |
|---|---|---|---|---|---|
| No. | 185 nM | 556 nM | 1667 nM | 5000 nM | (μM) |
| 426048 | 95 | 67 | 37 | 16 | 1.13 |
| 688739† | 100 | 108 | 112 | 67 | >5 |
| 688740† | 94 | 76 | 86 | 55 | >5 |
| 688742† | 65 | 112 | 70 | 77 | >5 |
| 688746† | 114 | 109 | 76 | 71 | >5 |
| 688750† | 104 | 80 | 122 | 108 | >5 |
| 688753† | 94 | 81 | 83 | 62 | >5 |
| 688758† | 70 | 76 | 72 | 56 | >5 |
| 688759† | 85 | 125 | 70 | 74 | >5 |
| 688761† | 91 | 95 | 88 | 93 | >5 |
| 688763† | 101 | 90 | 109 | 101 | >5 |
| 688769† | 80 | 97 | 87 | 71 | >5 |
| 688770† | 69 | 73 | 81 | 53 | >5 |
| 688776 | 117 | 89 | 87 | 85 | >5 |
| 688783 | 72 | 62 | 53 | 35 | 1.62 |
| 688787 | 107 | 119 | 73 | 57 | >5 |
| 688802 | 74 | 30 | 46 | 20 | 0.55 |
| 689014 | 102 | 85 | 54 | 43 | 2.86 |
| 689016 | 84 | 50 | 70 | 26 | 1.68 |

TABLE 48
Dose-dependent reduction of human APOE RNA
in Hep3B cells by modified oligonucleotides

| Compound | APOE RNA (% UTC) | | | | IC₅₀ |
|---|---|---|---|---|---|
| No. | 185 nM | 556 nM | 1667 nM | 5000 nM | (μM) |
| 426048 | 65 | 74 | 47 | 56 | >5 |
| 688738† | 81 | 76 | 85 | 87 | >5 |
| 688748† | 94 | 139 | 123 | 114 | >5 |
| 688749† | 109 | 88 | 100 | 58 | >5 |
| 688752† | 108 | 131 | 147 | 95 | >5 |
| 688756† | 70 | 73 | 88 | 55 | >5 |
| 688762† | 100 | 71 | 71 | 51 | >5 |
| 688771† | 97 | 95 | 101 | 89 | >5 |
| 688774† | 135 | 106 | 112 | 97 | >5 |
| 688775† | 137 | 112 | 201 | 104 | >5 |
| 688777 | 112 | 99 | 113 | 97 | >5 |
| 688778 | 116 | 75 | 78 | 58 | >5 |
| 688780 | 99 | 76 | 94 | 66 | >5 |
| 688800 | 125 | 108 | 92 | 92 | >5 |
| 688801 | 128 | 92 | 94 | 95 | >5 |
| 688806 | 76 | 152 | 116 | 75 | >5 |
| 688811 | 88 | 164 | 62 | 140 | >5 |
| 689014 | 83 | 81 | 98 | 56 | >5 |
| 689016 | 95 | 84 | 102 | 49 | >5 |

### Example 8: Dose-Dependent Inhibition of Human APOE in Transgenic Primary Mouse Hepatocytes by Modified Oligonucleotides

[0720] Modified oligonucleotides selected from Examples 1-4 above were tested at various doses in transgenic primary mouse hepatocytes. An ApoE4 transgenic mouse model (model #1549) was obtained from Taconic Biosciences. Cultured transgenic primary mouse hepatocytes at a density of 15,000 cells per well were treated by free uptake with various concentrations of modified oligonucleotide as specified in the tables below. After a treatment period of approximately 24 hours, total RNA was isolated from the cells and APOE RNA levels were measured by quantitative real-time RTPCR. Human APOE primer-probe set RTS3073 (described herein in Example 1) was used to measure RNA levels as described above. APOE RNA levels were normalized to total RNA content, as measured by RIBOGREEN®. Reduction of APOE RNA is presented in the tables below as percent APOE RNA, relative to untreated control cells (% UTC). Modified oligonucleotides marked with an “†” indicate that the modified oligonucleotide is complementary to the amplicon region of the primer probe set. Additional assays may be used to measure the potency and efficacy of the modified oligonucleotides complementary to the amplicon region.

[0721] The half maximal inhibitory concentration (IC₅₀) of each modified oligonucleotide was calculated using a linear regression on a log/linear plot of the data in Excel and is also presented in the tables below.

TABLE 49
Dose-dependent reduction of human APOE RNA in transgenic
primary mouse hepatocytes by modified oligonucleotides

| | APOE RNA (% UTC) | | | | |
|---|---|---|---|---|---|
| Compound | 222 | 667 | 2000 | 6000 | IC₅₀ |
| No. | nM | nM | nM | nM | (μM) |
| 689046 | 6 | 7 | 4 | 5 | <0.2 |
| 942358 | 45 | 53 | 57 | 58 | 0.54 |
| 942363 | 77 | 87 | 81 | 118 | >6 |
| 942472 | 59 | 79 | 92 | 104 | >6 |
| 942490 | 78 | 73 | 86 | 107 | >6 |
| 942496 | 63 | 81 | 81 | 94 | >6 |
| 942497 | 85 | 73 | 67 | 81 | >6 |
| 942514 | 76 | 75 | 71 | 61 | >6 |
| 942585 | 24 | 24 | 22 | 36 | <0.2 |
| 942591 | 23 | 25 | 24 | 18 | <0.2 |
| 942594 | 45 | 46 | 53 | 50 | 2.28 |
| 942595 | 43 | 45 | 36 | 38 | <0.2 |
| 942597 | 56 | 52 | 42 | 49 | 1.01 |
| 942618 | 99 | 83 | 76 | 111 | >6 |
| 942619 | 97 | 92 | 75 | 63 | >6 |
| 942627 | 144 | 107 | 86 | 63 | >6 |
| 942649 | 76 | 73 | 64 | 68 | >6 |
| 942765† | 131 | 86 | 79 | 95 | >6 |
| 942774† | 75 | 75 | 80 | 92 | >6 |

TABLE 50
Dose-dependent reduction of human APOE RNA in transgenic
primary mouse hepatocytes by modified oligonucleotides

| | APOE RNA (% UTC) | | | | |
|---|---|---|---|---|---|
| Compound | 222 | 667 | 2000 | 6000 | IC₅₀ |
| No. | nM | nM | nM | nM | (μM) |
| 689046 | 9 | 6 | 5 | 5 | <0.2 |
| 942354 | 57 | 58 | 72 | 103 | 0.23 |
| 942423 | 76 | 68 | 68 | 62 | >6 |
| 942499 | 90 | 94 | 92 | 106 | >6 |
| 942512 | 78 | 93 | 75 | 90 | >6 |
| 942542 | 135 | 113 | 102 | 142 | >6 |
| 942552 | 94 | 85 | 79 | 110 | >6 |
| 942564 | 67 | 89 | 83 | 109 | >6 |
| 942587 | 5 | 6 | 5 | 6 | <0.2 |
| 942588 | 4 | 5 | 4 | 4 | <0.2 |
| 942593 | 60 | 33 | 35 | 35 | 0.28 |
| 942598 | 15 | 13 | 14 | 17 | <0.2 |
| 942604 | 83 | 85 | 100 | 127 | >6 |
| 942617 | 82 | 87 | 72 | 69 | >6 |
| 942629 | 101 | 98 | 106 | 103 | >6 |
| 942665 | 120 | 120 | 87 | 110 | >6 |
| 942670 | 101 | 136 | 141 | 183 | >6 |
| 942724 | 96 | 74 | 86 | 80 | >6 |
| 942778† | 108 | 107 | 99 | 102 | >6 |

### Example 9: Design of RNAi Compounds with Antisense RNAi Oligonucleotides Complementary to a Human APOE Nucleic Acid

[0722] RNAi compounds comprising antisense RNAi oligonucleotides complementary to a human APOE nucleic acid and sense RNAi oligonucleotides complementary to the antisense RNAi oligonucleotides were designed as follows.

[0723] The RNAi compounds in the tables below consist of an antisense RNAi oligonucleotide and a sense RNAi oligonucleotide. The antisense RNAi oligonucleotide in each case is 23 nucleosides in length; has a sugar motif (from 5′ to 3′) of: yfyfyfyfyfyfyfyfyfyfyyy; wherein “y” represents a 2′40-methylribosyl sugar, and the “f” represents a 2′-fluororibosyl sugar; and a linkage motif (from 5′ to 3′) of: ssooooooooooooooooooss; wherein ‘o’ represents a phosphodiester internucleoside linkage and ‘s’ represents a phosphorothioate internucleoside linkage. The sense RNAi oligonucleotide in each case is 21 nucleosides in length; has a sugar motif (from 5′ to 3′) of: fyfyfyfyfyfyfyfyfyfyf; wherein “y” represents a 2′-O-methylribosyl sugar, and the “f” represents a 2′-fluororibosyl sugar; and a linkage motif (from 5′ to 3′) of: ssooooooooooooooooss; wherein ‘o’ represents a phosphodiester internucleoside linkage and ‘s’ represents a phosphorothioate internucleoside linkage. Each antisense RNAi oligonucleotides is complementary to the target nucleic acid (APOE), and each sense RNAi oligonucleotides is complementary to the first of the 21 nucleosides of the antisense RNAi oligonucleotide (from 5′ to 3′) wherein the last two 3′-nucleosides of the antisense RNAi oligonucleotides are not paired with the sense RNAi oligonucleotide (are overhanging nucleosides).

[0724] “Start site” indicates the 5′-most nucleoside to which the antisense RNAi oligonucleotides is complementary in the human gene sequence. “Stop site” indicates the 3′-most nucleoside to which the antisense RNAi oligonucleotide is complementary in the human gene sequence. Each modified antisense RNAi oligonucleoside listed in the tables below is 100% complementary to SEQ ID NO: 2 (described herein above). In cases where the antisense RNAi oligonucleotide is not 100% complementary to SEQ ID NO: 2, the antisense RNAi oligonucleotide is mapped to SEQ ID NO: 3 as shown in Table 52 below. Any mismatches of the antisense RNAi oligonucleotide to SEQ ID NO:3 are indicated as below.

TABLE 51
RNAi compounds targeting human APOE SEQ ID NO: 2

| | | | | SEQ ID | SEQ ID | | | |
|---|---|---|---|---|---|---|---|---|
| | Anti- | | | NO: 2 | NO: 2 | | | |
| | sense | | | Anti- | Anti- | Sense | | |
| | RNAi | Antisense | SEQ | sense | sense | RNAi | Sense | SEQ |
| Compoud | Oligo | Sequence | ID | Start | Stop | oligo | Sequence | ID |
| Number | ID | (5′ to 3′) | NO | Site | Site | ID | (5′ to 3′) | NO |
| 1518137 | 1518154 | UCACCUCCGCUG | 2552 | 48 | 70 | 1518148 | ACUCAGCCCCA | 2743 |
| | | GGGCUGAGUAG | | | | | GCGGAGGUGA | |
| 1518139 | 1518153 | AUGUGACCAGCA | 2553 | 210 | 232 | 1518145 | GGGCUGCGUUG | 2744 |
| | | ACGCAGCCCAC | | | | | CUGGUCACAU | |
| 1518140 | 1518152 | CACAGAACCUUC | 2554 | 190 | 212 | 1518147 | CAGGAAGAUGA | 2745 |
| | | AUCUUCCUGCC | | | | | AGGUUCUGUG | |
| 1518141 | 1518150 | CUCCUGGGGAAG | 2555 | 68 | 90 | 1518146 | AAGGACGUCCU | 2746 |
| | | GACGUCCUUCA | | | | | UCCCCAGGAG | |
| 1518142 | 1518151 | GGCCUGGCAUCC | 2556 | 230 | 252 | 1518144 | UUCCUGGCAGG | 2747 |
| | | UGCCAGGAAUG | | | | | AUGCCAGGCC | |
| 1518155 | 1518171 | UCCACCGCUUGC | 2557 | 250 | 272 | 1518164 | CAAGGUGGAGC | 2748 |
| | | UCCACCUUGGC | | | | | AAGCGGUGGA | |
| 1518156 | 1518169 | CACCCAGCGCAG | 2558 | 350 | 372 | 1518161 | UGGGAUUACCU | 2749 |
| | | GUAAUCCCAAA | | | | | GCGCUGGGUG | |
| 1518157 | 1518168 | AAAAGCGACCCA | 2559 | 330 | 352 | 1518162 | AACUGGCACUG | 2750 |
| | | GUGCCAGUUCC | | | | | GGUCGCUUUU | |
| 1518158 | 1518172 | UCCCAGCGCUGG | 2560 | 310 | 332 | 1518165 | GCAGAGCGGCC | 2751 |
| | | CCGCUCUGCCA | | | | | AGCGCUGGGA | |
| 1518159 | 1518167 | CCACUCGGUCUG | 2561 | 290 | 312 | 1518163 | CUGCGCCAGCA | 2752 |
| | | CUGGCGCAGCU | | | | | GACCGAGUGG | |
| 1518160 | 1518170 | GCUCGGGCUCCG | 2562 | 270 | 292 | 1518166 | AGACAGAGCCG | 2753 |
| | | GCUCUGUCUCC | | | | | GAGCCCGAGC | |
| 1518173 | 1518183 | ACCUGCUCAGAC | 2563 | 370 | 392 | 1518181 | GCAGACACUGU | 2754 |
| | | AGUGUCUGCAC | | | | | CUGAGCAGGU | |
| 1518174 | 1518185 | AGGCCUUCAACU | 2564 | 450 | 472 | 1518180 | CCAUGAAGGAG | 2755 |
| | | CCUUCAUGGUC | | | | | UUGAAGGCCU | |
| 1518175 | 1518187 | GUCUCGUCCAUC | 2565 | 430 | 452 | 1518178 | GAGGGCGCUGA | 2756 |
| | | AGCGCCCUCAG | | | | | UGGACGAGAC | |
| 1518176 | 1518190 | AGCUGAGCAGCU | 2566 | 390 | 412 | 1518186 | UGCAGGAGGAG | 2757 |
| | | CCUCCUGCACC | | | | | CUGCUCAGCU | |
| 1518177 | 1518188 | CAGUUCCUGGGU | 2567 | 410 | 432 | 1518182 | UCCCAGGUCAC | 2758 |
| | | GACCUGGGAGC | | | | | CCAGGAACUG | |
| 1518179 | 1518189 | UUCCUCCAGUUC | 2568 | 470 | 492 | 1518184 | UACAAAUCGGA | 2759 |
| | | CGAUUUGUAGG | | | | | ACUGGAGGAA | |
| 1518191 | 1518204 | UCCGCCACCGGG | 2569 | 490 | 512 | 1518200 | ACAACUGACCC | 2760 |
| | | GUCAGUUGUUC | | | | | CGGUGGCGGA | |
| 1518192 | 1518208 | GCCGCGGUACUG | 2570 | 590 | 612 | 1518198 | CGCCUGGUGCA | 2761 |
| | | CACCAGGCGGC | | | | | GUACCGCGGC | |
| 1518193 | 1518207 | GGCCGCACACGU | 2571 | 570 | 592 | 1518199 | ACAUGGAGGAC | 2762 |
| | | CCUCCAUGUCC | | | | | GUGUGCGGCC | |
| 1518194 | 1518203 | UCCGCGCCCAGC | 2572 | 550 | 572 | 1518197 | GCAGGCCCGGC | 2763 |
| | | CGGGCCUGCGC | | | | | UGGGCGCGGA | |
| 1518195 | 1518205 | CGCCGCCUGCAG | 2573 | 530 | 552 | 1518202 | UCCAAGGAGCU | 2764 |
| | | CUCCUUGGACA | | | | | GCAGGCGGCG | |
| 1518196 | 1518206 | ACAGCCGUGCCC | 2574 | 510 | 532 | 1518201 | AGGAGACGCGG | 2765 |
| | | GCGUCUCCUCC | | | | | GCACGGCUGU | |
| 1518209 | 1518221 | CCGAGCAUGGCC | 2575 | 610 | 632 | 1518218 | CGAGGUGCAGG | 2766 |
| | | UGCACCUCGCC | | | | | CCAUGCUCGG | |
| 1518210 | 1518222 | UGCCAGGCGCUU | 2576 | 710 | 732 | 1518217 | GACCUGCAGAA | 2767 |
| | | CUGCAGGUCAU | | | | | GCGCCUGGCA | |
| 1518211 | 1518226 | CAUCGGCAUCGC | 2577 | 690 | 712 | 1518216 | GGCUCCUCCGC | 2768 |
| | | GGAGGAGCCGC | | | | | GAUGCCGAUG | |
| 1518212 | 1518223 | CGCUUACGCAGC | 2578 | 670 | 692 | 1518215 | CCUGCGCAAGC | 2769 |
| | | UUGCGCAGGUG | | | | | UGCGUAAGCG | |
| 1518213 | 1518224 | GUGGGAGGCGAG | 2579 | 650 | 672 | 1518220 | CGGGUGCGCCU | 2770 |
| | | GCGCACCCGCA | | | | | CGCCUCCCAC | |
| 1518214 | 1518225 | GCAGCUCCUCGG | 2580 | 630 | 652 | 1518219 | GCCAGAGCACC | 2771 |
| | | UGCUCUGGCCG | | | | | GAGGAGCUGC | |
| 1518227 | 1518240 | CGGGCCCCGGCC | 2581 | 730 | 752 | 1518234 | AGUGUACCAGG | 2772 |
| | | UGGUACACUGC | | | | | CCGGGGCCCG | |
| 1518228 | 1518241 | UGGCGGCCCGCA | 2582 | 810 | 832 | 1518233 | AGGGCCGCGUG | 2773 |
| | | CGCGGCCCUGU | | | | | CGGGCCGCCA | |
| 1518229 | 1518239 | UGUUCCACCAGG | 2583 | 790 | 812 | 1518235 | CCUGGGGCCCC | 2774 |
| | | GGCCCCAGGCG | | | | | UGGUGGAACA | |
| 1518230 | 1518242 | GCGCUCGCGGAU | 2584 | 770 | 792 | 1518237 | CUCAGCGCCAU | 2775 |
| | | GGCGCUGAGGC | | | | | CCGCGAGCGC | |
| 1518231 | 1518243 | GGCCGCGCUCGG | 2585 | 750 | 772 | 1518236 | GCGAGGGCGCC | 2776 |
| | | CGCCCUCGCGG | | | | | GAGCGCGGCC | |
| 1518232 | 1518244 | GCCGGCCAGGGA | 2586 | 830 | 852 | 1518238 | ACUGUGGGCUC | 2777 |
| | | GCCCACAGUGG | | | | | CCUGGCCGGC | |
| 1518245 | 1518257 | GCCCGCUCCUGU | 2587 | 850 | 872 | 1518253 | CCAGCCGCUAC | 2778 |
| | | AGCGGCUGGCC | | | | | AGGAGCGGGC | |
| 1518246 | 1518261 | GCGCACCUCCGC | 2588 | 950 | 972 | 1518254 | GAGCAGGUGGC | 2779 |
| | | CACCUGCUCCU | | | | | GGAGGUGCGC | |
| 1518247 | 1518259 | CCUUCACCUCGU | 2589 | 930 | 952 | 1518252 | ACCGCCUGGAC | 2780 |
| | | CCAGGCGGUCG | | | | | GAGGUGAAGG | |
| 1518248 | 1518258 | CUCCUCCAUCCG | 2590 | 890 | 912 | 1518251 | CUGCGCGCGCG | 2781 |
| | | CGCGCGCAGCC | | | | | GAUGGAGGAG | |
| 1518249 | 1518260 | GCCGCUCGCCCC | 2591 | 870 | 892 | 1518255 | CCCAGGCCUGG | 2782 |
| | | AGGCCUGGGCC | | | | | GGCGAGCGGC | |
| 1518250 | 1518262 | UCGCGGGUCCGG | 2592 | 910 | 932 | 1518256 | GAUGGGCAGCC | 2783 |
| | | CUGCCCAUCUC | | | | | GGACCCGCGA | |
| 1518263 | 1518279 | GCCUGCUCCUCC | 2593 | 970 | 992 | 1518271 | CGCCAAGCUGG | 2784 |
| | | AGCUUGGCGCG | | | | | AGGAGCAGGC | |
| 1518264 | 1518276 | GCUGCAUGUCUU | 2594 | 1050 | 1072 | 1518270 | CCCUGGUGGAA | 2785 |
| | | CCACCAGGGGC | | | | | GACAUGCAGC | |
| 1518265 | 1518278 | CACCAGCCCGGC | 2595 | 1070 | 1092 | 1518273 | CGCCAGUGGGC | 2786 |
| | | CCACUGGCGCU | | | | | CGGGCUGGUG | |
| 1518266 | 1518275 | GGCUCGAACCAG | 2596 | 1030 | 1052 | 1518269 | CCUCAAGAGCU | 2787 |
| | | CUCUUGAGGCG | | | | | GGUUCGAGCC | |
| 1518267 | 1518280 | CCUGCAGGCGUA | 2597 | 990 | 1012 | 1518272 | CCCAGCAGAUA | 2788 |
| | | UCUGCUGGGCC | | | | | CGCCUGCAGG | |
| 1518268 | 1518277 | GCGGGCCUGGAA | 2598 | 1010 | 1032 | 1518274 | GCCGAGGCCUU | 2789 |
| | | GGCCUCGGCCU | | | | | CCAGGCCCGC | |
| 1518281 | 1518293 | ACGGCAGCCUGC | 2599 | 1090 | 1112 | 1518288 | GGAGAAGGUGC | 2790 |
| | | ACCUUCUCCAC | | | | | AGGCUGCCGU | |
| 1518282 | 1518295 | CGGCGUUCAGUG | 2600 | 1136 | 1158 | 1518289 | AGCGACAAUCA | 2791 |
| | | AUUGUCGCUGG | | | | | CUGAACGCCG | |
| 1518283 | 1518294 | GGCGUUCAGUGA | 2601 | 1135 | 1157 | 1518287 | CAGCGACAAUC | 2792 |
| | | UUGUCGCUGGG | | | | | ACUGAACGCC | |
| 1518284 | 1518297 | UCAGUGAUUGUC | 2602 | 1130 | 1152 | 1518291 | GUGCCCAGCGA | 2793 |
| | | GCUGGGCACAG | | | | | CAAUCACUGA | |
| 1518285 | 1518296 | CAGGGGCGGCGC | 2603 | 1110 | 1132 | 1518290 | UGGGCACCAGC | 2794 |
| | | UGGUGCCCACG | | | | | GCCGCCCCUG | |
| 1518286 | 1518298 | UCGGCGUUCAGU | 2604 | 1137 | 1159 | 1518292 | GCGACAAUCAC | 2795 |
| | | GAUUGUCGCUG | | | | | UGAACGCCGA | |
| 1518299 | 1518312 | UUCGGCGUUCAG | 2605 | 1138 | 1160 | 1518305 | CGACAAUCACU | 2796 |
| | | UGAUUGUCGCU | | | | | GAACGCCGAA | |
| 1518300 | 1518311 | AGGCUUCGGCGU | 2606 | 1142 | 1164 | 1518306 | AAUCACUGAAC | 2797 |
| | | UCAGUGAUUGU | | | | | GCCGAAGCCU | |
| 1518301 | 1518313 | GGCUUCGGCGUU | 2607 | 1141 | 1163 | 1518307 | CAAUCACUGAA | 2798 |
| | | CAGUGAUUGUC | | | | | CGCCGAAGCC | |
| 1518302 | 1518314 | GCUUCGGCGUUC | 2608 | 1140 | 1162 | 1518308 | ACAAUCACUGA | 2799 |
| | | AGUGAUUGUCG | | | | | ACGCCGAAGC | |
| 1518303 | 1518316 | CUUCGGCGUUCA | 2609 | 1139 | 1161 | 1518309 | GACAAUCACUG | 2800 |
| | | GUGAUUGUCGC | | | | | AACGCCGAAG | |
| 1518304 | 1518315 | CAGGCUUCGGCG | 2610 | 1143 | 1165 | 1518310 | AUCACUGAACG | 2801 |
| | | UUCAGUGAUUG | | | | | CCGAAGCCUG | |
| 1518317 | 1518329 | UGCAGGCUUCGG | 2611 | 1145 | 1167 | 1518323 | CACUGAACGCC | 2802 |
| | | CGUUCAGUGAU | | | | | GAAGCCUGCA | |
| 1518318 | 1518331 | UGGCUGCAGGCU | 2612 | 1149 | 1171 | 1518326 | GAACGCCGAAG | 2803 |
| | | UCGGCGUUCAG | | | | | CCUGCAGCCA | |
| 1518319 | 1518334 | GCAGGCUUCGGC | 2613 | 1144 | 1166 | 1518324 | UCACUGAACGC | 2804 |
| | | GUUCAGUGAUU | | | | | CGAAGCCUGC | |
| 1518320 | 1518332 | GGCUGCAGGCUU | 2614 | 1148 | 1170 | 1518325 | UGAACGCCGAA | 2805 |
| | | CGGCGUUCAGU | | | | | GCCUGCAGCC | |
| 1518321 | 1518333 | GCUGCAGGCUUC | 2615 | 1147 | 1169 | 1518328 | CUGAACGCCGA | 2806 |
| | | GGCGUUCAGUG | | | | | AGCCUGCAGC | |
| 1518322 | 1518330 | CUGCAGGCUUCG | 2616 | 1146 | 1168 | 1518327 | ACUGAACGCCG | 2807 |
| | | GCGUUCAGUGA | | | | | AAGCCUGCAG | |
| 1518335 | 1518347 | AUGGCUGCAGGC | 2617 | 1150 | 1172 | 1518342 | AACGCCGAAGC | 2808 |
| | | UUCGGCGUUCA | | | | | CUGCAGCCAU | |
| 1518336 | 1518348 | UCGCAUGGCUGC | 2618 | 1154 | 1176 | 1518341 | CCGAAGCCUGC | 2809 |
| | | AGGCUUCGGCG | | | | | AGCCAUGCGA | |
| 1518337 | 1518351 | CGCAUGGCUGCA | 2619 | 1153 | 1175 | 1518346 | GCCGAAGCCUG | 2810 |
| | | GGCUUCGGCGU | | | | | CAGCCAUGCG | |
| 1518338 | 1518350 | GCAUGGCUGCAG | 2620 | 1152 | 1174 | 1518344 | CGCCGAAGCCU | 2811 |
| | | GCUUCGGCGUU | | | | | GCAGCCAUGC | |
| 1518339 | 1518352 | CAUGGCUGCAGG | 2621 | 1151 | 1173 | 1518343 | ACGCCGAAGCC | 2812 |
| | | CUUCGGCGUUC | | | | | UGCAGCCAUG | |
| 1518340 | 1518349 | GUCGCAUGGCUG | 2622 | 1155 | 1177 | 1518345 | CGAAGCCUGCA | 2813 |
| | | CAGGCUUCGGC | | | | | GCCAUGCGAC | |
| 1518353 | 1518355 | GGUCGCAUGGCU | 2623 | 1156 | 1178 | 1518354 | GAAGCCUGCAG | 2814 |
| | | GCAGGCUUCGG | | | | | CCAUGCGACC | |
| 1518356 | 1518369 | GGGUCGCAUGGC | 2624 | 1157 | 1179 | 1518364 | AAGCCUGCAGC | 2815 |
| | | UGCAGGCUUCG | | | | | CAUGCGACCC | |
| 1518357 | 1518367 | GGGGUCGCAUGG | 2625 | 1158 | 1180 | 1518362 | AGCCUGCAGCC | 2816 |
| | | CUGCAGGCUUC | | | | | AUGCGACCCC | |
| 1518358 | 1518366 | CGUGGGGUCGCA | 2626 | 1161 | 1183 | 1518361 | CUGCAGCCAUG | 2817 |
| | | UGGCUGCAGGC | | | | | CGACCCCACG | |
| 1518359 | 1518370 | GUGGGGUCGCAU | 2627 | 1160 | 1182 | 1518363 | CCUGCAGCCAU | 2818 |
| | | GGCUGCAGGCU | | | | | GCGACCCCAC | |
| 1518360 | 1518368 | UGGGGUCGCAUG | 2628 | 1159 | 1181 | 1518365 | GCCUGCAGCCA | 2819 |
| | | GCUGCAGGCUU | | | | | UGCGACCCCA | |
| 1518371 | 1518385 | UGGCGUGGGGUC | 2629 | 1164 | 1186 | 1518380 | CAGCCAUGCGA | 2820 |
| | | GCAUGGCUGCA | | | | | CCCCACGCCA | |
| 1518372 | 1518388 | GGGUGGCGUGGG | 2630 | 1167 | 1189 | 1518379 | CCAUGCGACCCC | 2821 |
| | | GUCGCAUGGCU | | | | | ACGCCACCC | |
| 1518373 | 1518386 | GGUGGCGUGGGG | 2631 | 1166 | 1188 | 1518381 | GCCAUGCGACC | 2822 |
| | | UCGCAUGGCUG | | | | | CCACGCCACC | |
| 1518374 | 1518387 | GGCGUGGGGUCG | 2632 | 1163 | 1185 | 1518377 | GCAGCCAUGCG | 2823 |
| | | CAUGGCUGCAG | | | | | ACCCCACGCC | |
| 1518375 | 1518384 | GUGGCGUGGGGU | 2633 | 1165 | 1187 | 1518382 | AGCCAUGCGAC | 2824 |
| | | CGCAUGGCUGC | | | | | CCCACGCCAC | |
| 1518376 | 1518383 | GCGUGGGGUCGC | 2634 | 1162 | 1184 | 1518378 | UGCAGCCAUGC | 2825 |
| | | AUGGCUGCAGG | | | | | GACCCCACGC | |
| 1518389 | 1518406 | CGGGGUGGCGUG | 2635 | 1169 | 1191 | 1518400 | AUGCGACCCCA | 2826 |
| | | GGGUCGCAUGG | | | | | CGCCACCCCG | |
| 1518390 | 1518404 | GGCACGGGGUGG | 2636 | 1173 | 1195 | 1518397 | GACCCCACGCCA | 2827 |
| | | CGUGGGGUCGC | | | | | CCCCGUGCC | |
| 1518391 | 1518402 | GCACGGGGUGGC | 2637 | 1172 | 1194 | 1518399 | CGACCCCACGCC | 2828 |
| | | GUGGGGUCGCA | | | | | ACCCCGUGC | |
| 1518392 | 1518403 | CACGGGGUGGCG | 2638 | 1171 | 1193 | 1518398 | GCGACCCCACGC | 2829 |
| | | UGGGGUCGCAU | | | | | CACCCCGUG | |
| 1518393 | 1518405 | GGGGUGGCGUGG | 2639 | 1168 | 1190 | 1518396 | CAUGCGACCCC | 2830 |
| | | GGUCGCAUGGC | | | | | ACGCCACCCC | |
| 1518394 | 1518401 | ACGGGGUGGCGU | 2640 | 1170 | 1192 | 1518395 | UGCGACCCCAC | 2831 |
| | | GGGGUCGCAUG | | | | | GCCACCCCGU | |
| 1518407 | 1518419 | GAGGCACGGGGU | 2641 | 1175 | 1197 | 1518416 | CCCCACGCCACC | 2832 |
| | | GGCGUGGGGUC | | | | | CCGUGCCUC | |
| 1518408 | 1518423 | GCAGGAGGCACG | 2642 | 1179 | 1201 | 1518415 | ACGCCACCCCGU | 2833 |
| | | GGGUGGCGUGG | | | | | GCCUCCUGC | |
| 1518409 | 1518424 | CAGGAGGCACGG | 2643 | 1178 | 1200 | 1518413 | CACGCCACCCCG | 2834 |
| | | GGUGGCGUGGG | | | | | UGCCUCCUG | |
| 1518410 | 1518421 | GGAGGCACGGGG | 2644 | 1176 | 1198 | 1518414 | CCCACGCCACCC | 2835 |
| | | UGGCGUGGGGU | | | | | CGUGCCUCC | |
| 1518411 | 1518422 | AGGAGGCACGGG | 2645 | 1177 | 1199 | 1518418 | CCACGCCACCCC | 2836 |
| | | GUGGCGUGGGG | | | | | GUGCCUCCU | |
| 1518412 | 1518420 | AGGCACGGGGUG | 2646 | 1174 | 1196 | 1518417 | ACCCCACGCCAC | 2837 |
| | | GCGUGGGGUCG | | | | | CCCGUGCCU | |
| 1518425 | 1518440 | GGCAGGAGGCAC | 2647 | 1180 | 1202 | 1518432 | CGCCACCCCGUG | 2838 |
| | | GGGGUGGCGUG | | | | | CCUCCUGCC | |
| 1518426 | 1518441 | GCGGAGGCAGGA | 2648 | 1185 | 1207 | 1518433 | CCCCGUGCCUCC | 2839 |
| | | GGCACGGGGUG | | | | | UGCCUCCGC | |
| 1518427 | 1518442 | GGAGGCAGGAGG | 2649 | 1183 | 1205 | 1518436 | CACCCCGUGCCU | 2840 |
| | | CACGGGGUGGC | | | | | CCUGCCUCC | |
| 1518428 | 1518438 | CGGAGGCAGGAG | 2650 | 1184 | 1206 | 1518435 | ACCCCGUGCCUC | 2841 |
| | | GCACGGGGUGG | | | | | CUGCCUCCG | |
| 1518429 | 1518437 | GAGGCAGGAGGC | 2651 | 1182 | 1204 | 1518434 | CCACCCCGUGCC | 2842 |
| | | ACGGGGUGGCG | | | | | UCCUGCCUC | |
| 1518430 | 1518439 | AGGCAGGAGGCA | 2652 | 1181 | 1203 | 1518431 | GCCACCCCGUGC | 2843 |
| | | CGGGGUGGCGU | | | | | CUCCUGCCU | |
| 1518443 | 1518456 | CGCGGAGGCAGG | 2653 | 1186 | 1208 | 1518450 | CCCGUGCCUCCU | 2844 |
| | | AGGCACGGGGU | | | | | GCCUCCGCG | |
| 1518444 | 1518460 | GGCUGCGCGGAG | 2654 | 1191 | 1213 | 1518451 | GCCUCCUGCCUC | 2845 |
| | | GCAGGAGGCAC | | | | | CGCGCAGCC | |
| 1518445 | 1518455 | GCUGCGCGGAGG | 2655 | 1190 | 1212 | 1518453 | UGCCUCCUGCC | 2846 |
| | | CAGGAGGCACG | | | | | UCCGCGCAGC | |
| 1518446 | 1518458 | UGCGCGGAGGCA | 2656 | 1188 | 1210 | 1518454 | CGUGCCUCCUG | 2847 |
| | | GGAGGCACGGG | | | | | CCUCCGCGCA | |
| 1518447 | 1518459 | GCGCGGAGGCAG | 2657 | 1187 | 1209 | 1518449 | CCGUGCCUCCU | 2848 |
| | | GAGGCACGGGG | | | | | GCCUCCGCGC | |
| 1518448 | 1518457 | CUGCGCGGAGGC | 2658 | 1189 | 1211 | 1518452 | GUGCCUCCUGC | 2849 |
| | | AGGAGGCACGG | | | | | CUCCGCGCAG | |
| 1518461 | 1518477 | CAGGCUGCGCGG | 2659 | 1193 | 1215 | 1518467 | CUCCUGCCUCCG | 2850 |
| | | AGGCAGGAGGC | | | | | CGCAGCCUG | |
| 1518462 | 1518476 | CGCUGCAGGCUG | 2660 | 1198 | 1220 | 1518469 | GCCUCCGCGCA | 2851 |
| | | CGCGGAGGCAG | | | | | GCCUGCAGCG | |
| 1518463 | 1518474 | CUGCAGGCUGCG | 2661 | 1196 | 1218 | 1518472 | CUGCCUCCGCGC | 2852 |
| | | CGGAGGCAGGA | | | | | AGCCUGCAG | |
| 1518464 | 1518473 | UGCAGGCUGCGC | 2662 | 1195 | 1217 | 1518471 | CCUGCCUCCGCG | 2853 |
| | | GGAGGCAGGAG | | | | | CAGCCUGCA | |
| 1518465 | 1518478 | AGGCUGCGCGGA | 2663 | 1192 | 1214 | 1518470 | CCUCCUGCCUCC | 2854 |
| | | GGCAGGAGGCA | | | | | GCGCAGCCU | |
| 1518466 | 1518475 | GCAGGCUGCGCG | 2664 | 1194 | 1216 | 1518468 | UCCUGCCUCCGC | 2855 |
| | | GAGGCAGGAGG | | | | | GCAGCCUGC | |
| 1518479 | 1518492 | CCGCUGCAGGCU | 2665 | 1199 | 1221 | 1518489 | CCUCCGCGCAGC | 2856 |
| | | GCGCGGAGGCA | | | | | CUGCAGCGG | |
| 1518480 | 1518493 | UCUCCCGCUGCA | 2666 | 1203 | 1225 | 1518486 | CGCGCAGCCUG | 2857 |
| | | GGCUGCGCGGA | | | | | CAGCGGGAGA | |
| 1518481 | 1518491 | CUCCCGCUGCAG | 2667 | 1202 | 1224 | 1518485 | CCGCGCAGCCU | 2858 |
| | | GCUGCGCGGAG | | | | | GCAGCGGGAG | |
| 1518482 | 1518495 | CCCGCUGCAGGC | 2668 | 1200 | 1222 | 1518488 | CUCCGCGCAGCC | 2859 |
| | | UGCGCGGAGGC | | | | | UGCAGCGGG | |
| 1518483 | 1518496 | UCCCGCUGCAGG | 2669 | 1201 | 1223 | 1518487 | UCCGCGCAGCC | 2860 |
| | | CUGCGCGGAGG | | | | | UGCAGCGGGA | |
| 1518484 | 1518494 | GCUGCAGGCUGC | 2670 | 1197 | 1219 | 1518490 | UGCCUCCGCGC | 2861 |
| | | GCGGAGGCAGG | | | | | AGCCUGCAGC | |
| 1518497 | 1518509 | GUCUCCCGCUGC | 2671 | 1204 | 1226 | 1518501 | GCGCAGCCUGC | 2862 |
| | | AGGCUGCGCGG | | | | | AGCGGGAGAC | |
| 1518498 | 1518514 | GGUCUCCCGCUG | 2672 | 1205 | 1227 | 1518506 | CGCAGCCUGCA | 2863 |
| | | CAGGCUGCGCG | | | | | GCGGGAGACC | |
| 1518499 | 1518511 | ACAGGGUCUCCC | 2673 | 1209 | 1231 | 1518504 | GCCUGCAGCGG | 2864 |
| | | GCUGCAGGCUG | | | | | GAGACCCUGU | |
| 1518500 | 1518512 | AGGGUCUCCCGC | 2674 | 1207 | 1229 | 1518508 | CAGCCUGCAGC | 2865 |
| | | UGCAGGCUGCG | | | | | GGGAGACCCU | |
| 1518502 | 1518513 | GGGUCUCCCGCU | 2675 | 1206 | 1228 | 1518505 | GCAGCCUGCAG | 2866 |
| | | GCAGGCUGCGC | | | | | CGGGAGACCC | |
| 1518503 | 1518510 | CAGGGUCUCCCG | 2676 | 1208 | 1230 | 1518507 | AGCCUGCAGCG | 2867 |
| | | CUGCAGGCUGC | | | | | GGAGACCCUG | |
| 1518515 | 1518530 | GACAGGGUCUCC | 2677 | 1210 | 1232 | 1518525 | CCUGCAGCGGG | 2868 |
| | | CGCUGCAGGCU | | | | | AGACCCUGUC | |
| 1518516 | 1518531 | GCGGGGACAGGG | 2678 | 1215 | 1237 | 1518521 | AGCGGGAGACC | 2869 |
| | | UCUCCCGCUGC | | | | | CUGUCCCCGC | |
| 1518517 | 1518529 | CGGGGACAGGGU | 2679 | 1214 | 1236 | 1518522 | CAGCGGGAGAC | 2870 |
| | | CUCCCGCUGCA | | | | | CCUGUCCCCG | |
| 1518518 | 1518528 | GGGGACAGGGUC | 2680 | 1213 | 1235 | 1518524 | GCAGCGGGAGA | 2871 |
| | | UCCCGCUGCAG | | | | | CCCUGUCCCC | |
| 1518519 | 1518532 | GGACAGGGUCUC | 2681 | 1211 | 1233 | 1518526 | CUGCAGCGGGA | 2872 |
| | | CCGCUGCAGGC | | | | | GACCCUGUCC | |
| 1518520 | 1518527 | GGGACAGGGUCU | 2682 | 1212 | 1234 | 1518523 | UGCAGCGGGAG | 2873 |
| | | CCCGCUGCAGG | | | | | ACCCUGUCCC | |
| 1518533 | 1518550 | GGCGGGGACAGG | 2683 | 1216 | 1238 | 1518540 | GCGGGAGACCC | 2874 |
| | | GUCUCCCGCUG | | | | | UGUCCCCGCC | |
| 1518534 | 1518545 | GCUGGGGCGGGG | 2684 | 1221 | 1243 | 1518539 | AGACCCUGUCC | 2875 |
| | | ACAGGGUCUCC | | | | | CCGCCCCAGC | |
| 1518535 | 1518549 | CUGGGGCGGGGA | 2685 | 1220 | 1242 | 1518541 | GAGACCCUGUC | 2876 |
| | | CAGGGUCUCCC | | | | | CCCGCCCCAG | |
| 1518536 | 1518546 | UGGGGCGGGGAC | 2686 | 1219 | 1241 | 1518542 | GGAGACCCUGU | 2877 |
| | | AGGGUCUCCCG | | | | | CCCCGCCCCA | |
| 1518537 | 1518548 | GGGCGGGGACAG | 2687 | 1217 | 1239 | 1518544 | CGGGAGACCCU | 2878 |
| | | GGUCUCCCGCU | | | | | GUCCCCGCCC | |
| 1518538 | 1518547 | GGGGCGGGGACA | 2688 | 1218 | 1240 | 1518543 | GGGAGACCCUG | 2879 |
| | | GGGUCUCCCGC | | | | | UCCCCGCCCC | |
| 1518551 | 1518563 | GGACGGCUGGGG | 2689 | 1226 | 1248 | 1518558 | CUGUCCCCGCCC | 2880 |
| | | CGGGGACAGGG | | | | | CAGCCGUCC | |
| 1518552 | 1518564 | GGCUGGGGCGGG | 2690 | 1222 | 1244 | 1518557 | GACCCUGUCCCC | 2881 |
| | | GACAGGGUCUC | | | | | GCCCCAGCC | |
| 1518553 | 1518565 | GACGGCUGGGGC | 2691 | 1225 | 1247 | 1518559 | CCUGUCCCCGCC | 2882 |
| | | GGGGACAGGGU | | | | | CCAGCCGUC | |
| 1518554 | 1518567 | ACGGCUGGGGCG | 2692 | 1224 | 1246 | 1518561 | CCCUGUCCCCGC | 2883 |
| | | GGGACAGGGUC | | | | | CCCAGCCGU | |
| 1518555 | 1518566 | CGGCUGGGGCGG | 2693 | 1223 | 1245 | 1518560 | ACCCUGUCCCCG | 2884 |
| | | GGACAGGGUCU | | | | | CCCCAGCCG | |
| 1518556 | 1518568 | AGGACGGCUGGG | 2694 | 1227 | 1249 | 1518562 | UGUCCCCGCCCC | 2885 |
| | | GCGGGGACAGG | | | | | AGCCGUCCU | |
| 1518569 | 1518582 | GAGGACGGCUGG | 2695 | 1228 | 1250 | 1518579 | GUCCCCGCCCCA | 2886 |
| | | GGCGGGGACAG | | | | | GCCGUCCUC | |
| 1518570 | 1518586 | CCAGGAGGACGG | 2696 | 1232 | 1254 | 1518578 | CCGCCCCAGCCG | 2887 |
| | | CUGGGGCGGGG | | | | | UCCUCCUGG | |
| 1518571 | 1518585 | CCCAGGAGGACG | 2697 | 1233 | 1255 | 1518576 | CGCCCCAGCCGU | 2888 |
| | | GCUGGGGCGGG | | | | | CCUCCUGGG | |
| 1518572 | 1518581 | CAGGAGGACGGC | 2698 | 1231 | 1253 | 1518575 | CCCGCCCCAGCC | 2889 |
| | | UGGGGCGGGGA | | | | | GUCCUCCUG | |
| 1518573 | 1518583 | AGGAGGACGGCU | 2699 | 1230 | 1252 | 1518577 | CCCCGCCCCAGC | 2890 |
| | | GGGGCGGGGAC | | | | | CGUCCUCCU | |
| 1518574 | 1518584 | GGAGGACGGCUG | 2700 | 1229 | 1251 | 1518580 | UCCCCGCCCCAG | 2891 |
| | | GGGCGGGGACA | | | | | CCGUCCUCC | |
| 1518587 | 1518600 | CCCCAGGAGGAC | 2701 | 1234 | 1256 | 1518596 | GCCCCAGCCGUC | 2892 |
| | | GGCUGGGGCGG | | | | | CUCCUGGGG | |
| 1518588 | 1518599 | GUCCACCCCAGG | 2702 | 1239 | 1261 | 1518597 | AGCCGUCCUCC | 2893 |
| | | AGGACGGCUGG | | | | | UGGGGUGGAC | |
| 1518589 | 1518602 | UCCACCCCAGGA | 2703 | 1238 | 1260 | 1518593 | CAGCCGUCCUCC | 2894 |
| | | GGACGGCUGGG | | | | | UGGGGUGGA | |
| 1518590 | 1518603 | CCACCCCAGGAG | 2704 | 1237 | 1259 | 1518595 | CCAGCCGUCCUC | 2895 |
| | | GACGGCUGGGG | | | | | CUGGGGUGG | |
| 1518591 | 1518604 | CACCCCAGGAGG | 2705 | 1236 | 1258 | 1518598 | CCCAGCCGUCCU | 2896 |
| | | ACGGCUGGGGC | | | | | CCUGGGGUG | |
| 1518592 | 1518601 | ACCCCAGGAGGA | 2706 | 1235 | 1257 | 1518594 | CCCCAGCCGUCC | 2897 |
| | | CGGCUGGGGCG | | | | | UCCUGGGGU | |
| 1518605 | 1518617 | GGUCCACCCCAG | 2707 | 1240 | 1262 | 1518612 | GCCGUCCUCCU | 2898 |
| | | GAGGACGGCUG | | | | | GGGGUGGACC | |
| 1518606 | 1518618 | UAGGGUCCACCC | 2708 | 1243 | 1265 | 1518611 | GUCCUCCUGGG | 2899 |
| | | CAGGAGGACGG | | | | | GUGGACCCUA | |
| 1518607 | 1518620 | GGGUCCACCCCA | 2709 | 1241 | 1263 | 1518615 | CCGUCCUCCUG | 2900 |
| | | GGAGGACGGCU | | | | | GGGUGGACCC | |
| 1518608 | 1518621 | AGGGUCCACCCC | 2710 | 1242 | 1264 | 1518614 | CGUCCUCCUGG | 2901 |
| | | AGGAGGACGGC | | | | | GGUGGACCCU | |
| 1518609 | 1518619 | CUAGGGUCCACC | 2711 | 1244 | 1266 | 1518613 | UCCUCCUGGGG | 2902 |
| | | CCAGGAGGACG | | | | | UGGACCCUAG | |
| 1518610 | 1518622 | ACUAGGGUCCAC | 2712 | 1245 | 1267 | 1518616 | CCUCCUGGGGU | 2903 |
| | | CCCAGGAGGAC | | | | | GGACCCUAGU | |
| 1518623 | 1518637 | AACUAGGGUCCA | 2713 | 1246 | 1268 | 1518629 | CUCCUGGGGUG | 2904 |
| | | CCCCAGGAGGA | | | | | GACCCUAGUU | |
| 1518624 | 1518640 | AUUAAACUAGGG | 2714 | 1250 | 1272 | 1518632 | UGGGGUGGACC | 2905 |
| | | UCCACCCCAGG | | | | | CUAGUUUAAU | |
| 1518625 | 1518639 | UUAAACUAGGGU | 2715 | 1249 | 1271 | 1518634 | CUGGGGUGGAC | 2906 |
| | | CCACCCCAGGA | | | | | CCUAGUUUAA | |
| 1518626 | 1518635 | UAUUAAACUAGG | 2716 | 1251 | 1273 | 1518633 | GGGGUGGACCC | 2907 |
| | | GUCCACCCCAG | | | | | UAGUUUAAUA | |
| 1518627 | 1518636 | AAACUAGGGUCC | 2717 | 1247 | 1269 | 1518630 | UCCUGGGGUGG | 2908 |
| | | ACCCCAGGAGG | | | | | ACCCUAGUUU | |
| 1518628 | 1518638 | UAAACUAGGGUC | 2718 | 1248 | 1270 | 1518631 | CCUGGGGUGGA | 2909 |
| | | CACCCCAGGAG | | | | | CCCUAGUUUA | |
| 1518641 | 1518656 | CUUUAUUAAACU | 2719 | 1254 | 1276 | 1518651 | GUGGACCCUAG | 2910 |
| | | AGGGUCCACCC | | | | | UUUAAUAAAG | |
| 1518642 | 1518654 | AAUCUUUAUUAA | 2720 | 1257 | 1279 | 1518649 | GACCCUAGUUU | 2911 |
| | | ACUAGGGUCCA | | | | | AAUAAAGAUU | |
| 1518643 | 1518655 | AUCUUUAUUAAA | 2721 | 1256 | 1278 | 1518647 | GGACCCUAGUU | 2912 |
| | | CUAGGGUCCAC | | | | | UAAUAAAGAU | |
| 1518644 | 1518653 | UCUUUAUUAAAC | 2722 | 1255 | 1277 | 1518648 | UGGACCCUAGU | 2913 |
| | | UAGGGUCCACC | | | | | UUAAUAAAGA | |
| 1518645 | 1518658 | UUUAUUAAACUA | 2723 | 1253 | 1275 | 1518650 | GGUGGACCCUA | 2914 |
| | | GGGUCCACCCC | | | | | GUUUAAUAAA | |
| 1518646 | 1518657 | UUAUUAAACUAG | 2724 | 1252 | 1274 | 1518652 | GGGUGGACCCU | 2915 |
| | | GGUCCACCCCA | | | | | AGUUUAAUAA | |
| 1518659 | 1518671 | GAAUCUUUAUUA | 2725 | 1258 | 1280 | 1518665 | ACCCUAGUUUA | 2916 |
| | | AACUAGGGUCC | | | | | AUAAAGAUUC | |
| 1518660 | 1518672 | UGGUGAAUCUUU | 2726 | 1262 | 1284 | 1518666 | UAGUUUAAUAA | 2917 |
| | | AUUAAACUAGG | | | | | AGAUUCACCA | |
| 1518661 | 1518673 | GGUGAAUCUUUA | 2727 | 1261 | 1283 | 1518667 | CUAGUUUAAUA | 2918 |
| | | UUAAACUAGGG | | | | | AAGAUUCACC | |
| 1518662 | 1518674 | GUGAAUCUUUAU | 2728 | 1260 | 1282 | 1518668 | CCUAGUUUAAU | 2919 |
| | | UAAACUAGGGU | | | | | AAAGAUUCAC | |
| 1518663 | 1518676 | UGAAUCUUUAUU | 2729 | 1259 | 1281 | 1518669 | CCCUAGUUUAA | 2920 |
| | | AAACUAGGGUC | | | | | UAAAGAUUCA | |
| 1518664 | 1518675 | UUGGUGAAUCUU | 2730 | 1263 | 1285 | 1518670 | AGUUUAAUAAA | 2921 |
| | | UAUUAAACUAG | | | | | GAUUCACCAA | |
| 1518677 | 1518692 | CUUGGUGAAUCU | 2731 | 1264 | 1286 | 1518686 | GUUUAAUAAAG | 2922 |
| | | UUAUUAAACUA | | | | | AUUCACCAAG | |
| 1518678 | 1518689 | UGAAACUUGGUG | 2732 | 1269 | 1291 | 1518684 | AUAAAGAUUCA | 2923 |
| | | AAUCUUUAUUA | | | | | CCAAGUUUCA | |
| 1518679 | 1518690 | GAAACUUGGUGA | 2733 | 1268 | 1290 | 1518688 | AAUAAAGAUUC | 2924 |
| | | AUCUUUAUUAA | | | | | ACCAAGUUUC | |
| 1518680 | 1518693 | AAACUUGGUGAA | 2734 | 1267 | 1289 | 1518683 | UAAUAAAGAUU | 2925 |
| | | UCUUUAUUAAA | | | | | CACCAAGUUU | |
| 1518681 | 1518691 | AACUUGGUGAAU | 2735 | 1266 | 1288 | 1518685 | UUAAUAAAGAU | 2926 |
| | | CUUUAUUAAAC | | | | | UCACCAAGUU | |
| 1518682 | 1518694 | ACUUGGUGAAUC | 2736 | 1265 | 1287 | 1518687 | UUUAAUAAAGA | 2927 |
| | | UUUAUUAAACU | | | | | UUCACCAAGU | |
| 1518695 | 1518705 | CGUGAAACUUGG | 2737 | 1271 | 1293 | 1518700 | AAAGAUUCACC | 2928 |
| | | UGAAUCUUUAU | | | | | AAGUUUCACG | |
| 1518697 | 1518706 | GCGUGAAACUUG | 2738 | 1272 | 1294 | 1518701 | AAGAUUCACCA | 2929 |
| | | GUGAAUCUUUA | | | | | AGUUUCACGC | |
| 1518698 | 1518707 | UGCGUGAAACUU | 2739 | 1273 | 1295 | 1518702 | AGAUUCACCAA | 2930 |
| | | GGUGAAUCUUU | | | | | GUUUCACGCA | |
| 1518699 | 1518709 | GUGAAACUUGGU | 2740 | 1270 | 1292 | 1518703 | UAAAGAUUCAC | 2931 |
| | | GAAUCUUUAUU | | | | | CAAGUUUCAC | |

TABLE 52
RNAi compounds targeting human APOE SEQ ID NO: 3

| | | | | SEQ ID | SEQ ID | Sense | | |
|---|---|---|---|---|---|---|---|---|
| | Antisense | Antisense | SEQ | NO: 3 | NO: 3 | RNAi | Sense | SEQ |
| Compound | RNAi | Sequence | ID | Antisense | Antisense | Oligo | Sequence | ID |
| Number | Oligo ID | (5′ to 3′) | NO | Start Site | Stop Site | ID | (5′ to 3′) | NO |
| 1518138 | 1518149 | GCCUGUGAUUG | 2741 | 40 | 62 | 1518143 | GCCGACUGGCC | 2932 |
| | | GCCAGUCGGCU | | | | | AAUCACAGGC | |
| | | C | | | | | | |
| 1518696 | 1518708* | GGCGGCCGCGC | 2742 | 438 | 460 | 1518704 | UGGAGGACGU | 2933 |
| | | ACGUCCUCCAU | | | | | GCGCGGCCGCC | |
| | | G | | | | | | |

*Compound No. 1518708 has a single mismatch to SEQ ID NO: 3 located at position 10 (from 5′ to 3′) of the antisense strand.

### Example 10: Effect of RNAi Compounds on Human APOE RNA In Vitro, Single Dose

[0725] Double-stranded RNAi compounds described above were tested in a series of experiments under the same culture conditions. The results for each experiment are presented in separate tables below.

[0726] Cultured Hep3B cells at a density of 20,000 cells per well were transfected using RNAiMAX with 20 nM of double stranded RNAi. After a treatment period of approximately 24 hours, RNA was isolated from the cells and APOE RNA levels were measured by quantitative real-time RTPCR. Human primer probe set RTS3073 (described herein in Example 1 above) was used to measure RNA levels. APOE RNA levels were normalized to total RNA content, as measured by RIBOGREEN®. Results are presented as percent APOE RNA relative to the amount in untreated control cells (% UTC). The values marked with an “†” indicate that the modified oligonucleotide is complementary to the amplicon region of the primer probe set. Additional assays may be used to measure the potency and efficacy of the modified oligonucleotides complementary to the amplicon region. N.D. in the tables below refers to instances where the value was Not Defined.

TABLE 53
Reduction of APOE RNA by RNAi

| Compound Number | APOE (% UTC) |
|---|---|
| 1518137 | 107 |
| 1518138 | 87 |
| 1518139 | 7 |
| 1518140 | 7 |
| 1518141 | 81 |
| 1518142 | 132 |
| 1518155 | 43 |
| 1518156 | 76† |
| 1518157 | 52† |
| 1518158 | 104 |
| 1518159 | 25 |
| 1518160 | 89 |
| 1518173 | 59† |
| 1518174 | 12 |
| 1518175 | 42† |
| 1518176 | 88† |
| 1518177 | 81† |
| 1518179 | 97 |
| 1518191 | 90 |
| 1518192 | 81 |
| 1518193 | 111 |
| 1518194 | 103 |
| 1518195 | 35 |
| 1518196 | 84 |
| 1518209 | 76 |
| 1518210 | 23 |
| 1518211 | 96 |
| 1518212 | 43 |
| 1518213 | 83 |
| 1518214 | 91 |
| 1518227 | 88 |
| 1518228 | 77 |
| 1518229 | 89 |
| 1518230 | 71 |
| 1518231 | 104 |
| 1518232 | 75 |
| 1518245 | 74 |
| 1518246 | 66 |
| 1518247 | 88 |
| 1518248 | 84 |
| 1518249 | 84 |
| 1518250 | 86 |
| 1518263 | 75 |
| 1518264 | 62 |
| 1518265 | 92 |
| 1518266 | 7 |
| 1518267 | 80 |
| 1518268 | 74 |
| 1518281 | 57 |
| 1518282 | 5 |
| 1518283 | 21 |
| 1518284 | 57 |
| 1518285 | 72 |
| 1518286 | 23 |
| 1518299 | 23 |
| 1518300 | 55 |
| 1518301 | 38 |
| 1518302 | 41 |
| 1518303 | 39 |
| 1518304 | 10 |
| 1518317 | 43 |
| 1518318 | 72 |
| 1518319 | 14 |
| 1518320 | 71 |
| 1518321 | 41 |
| 1518322 | 60 |
| 1518335 | 5 |
| 1518336 | 38 |
| 1518337 | 17 |
| 1518338 | 42 |
| 1518339 | 9 |
| 1518340 | 16 |
| 1518353 | 76 |
| 1518356 | 61 |
| 1518357 | 11 |
| 1518358 | 64 |
| 1518359 | 53 |
| 1518360 | 40 |
| 1518372 | 68 |
| 1518376 | 68 |

TABLE 54
Reduction of APOE RNA by RNAi

| Compound Number | APOE (% UTC) |
|---|---|
| 1518425 | 106 |
| 1518426 | 111 |
| 1518427 | 107 |
| 1518428 | 118 |
| 1518429 | 109 |
| 1518430 | 110 |
| 1518443 | 107 |
| 1518444 | 112 |
| 1518445 | 103 |
| 1518446 | 100 |
| 1518447 | 113 |
| 1518448 | 87 |
| 1518461 | 88 |
| 1518462 | 91 |
| 1518463 | 97 |
| 1518464 | 101 |
| 1518465 | 83 |
| 1518466 | 101 |
| 1518479 | 87 |
| 1518480 | N.D. |
| 1518481 | N.D. |
| 1518482 | 68 |
| 1518483 | 44 |
| 1518484 | 82 |
| 1518497 | 67 |
| 1518498 | N.D. |
| 1518499 | 61 |
| 1518500 | 79 |
| 1518502 | 82 |
| 1518503 | 15 |
| 1518515 | 55 |
| 1518516 | 53 |
| 1518517 | N.D. |
| 1518518 | 67 |
| 1518519 | 11 |
| 1518520 | 68 |
| 1518533 | 86 |
| 1518534 | 69 |
| 1518535 | 79 |
| 1518536 | 89 |
| 1518537 | 72 |
| 1518538 | 94 |
| 1518551 | 84 |
| 1518552 | N.D. |
| 1518553 | N.D. |
| 1518554 | 76 |
| 1518555 | 74 |
| 1518556 | 61 |
| 1518569 | 60 |
| 1518570 | 65 |
| 1518571 | 67 |
| 1518572 | 82 |
| 1518573 | N.D. |
| 1518574 | 73 |
| 1518587 | 66 |
| 1518588 | N.D. |
| 1518589 | 82 |
| 1518590 | 66 |
| 1518591 | 74 |
| 1518592 | 71 |
| 1518605 | 60 |
| 1518606 | N.D. |
| 1518607 | 70 |
| 1518608 | 67 |
| 1518609 | 57 |
| 1518610 | 71 |
| 1518623 | 65 |
| 1518624 | 50 |
| 1518625 | 67 |
| 1518626 | 6 |
| 1518627 | 21 |
| 1518628 | 17 |
| 1518641 | 61 |
| 1518642 | 2 |
| 1518643 | 2 |
| 1518644 | 2 |
| 1518645 | 46 |
| 1518646 | 24 |
| 1518659 | 2 |
| 1518663 | 2 |

TABLE 55
Reduction of APOE RNA by RNAi

| Compound Number | APOE (% UTC) |
|---|---|
| 1518371 | 85 |
| 1518373 | 69 |
| 1518374 | 91 |
| 1518375 | 96 |
| 1518389 | 102 |
| 1518390 | 93 |
| 1518391 | 100 |
| 1518392 | 104 |
| 1518393 | 98 |
| 1518394 | 96 |
| 1518407 | 89 |
| 1518408 | 96 |
| 1518409 | 92 |
| 1518410 | 100 |
| 1518411 | 94 |
| 1518412 | 82 |
| 1518660 | 6 |
| 1518661 | 6 |
| 1518662 | N.D. |
| 1518664 | 8 |
| 1518677 | 6 |
| 1518678 | 5 |
| 1518679 | 6 |
| 1518680 | 7 |
| 1518681 | 3 |
| 1518682 | 4 |
| 1518695 | 12 |
| 1518696 | 98 |
| 1518697 | 7 |
| 1518698 | 61 |
| 1518699 | 7 |

### Example 11: Design of Modified Oligonucleotides Complementary to Human APOE Nucleic Acid

[0727] Modified oligonucleotides complementary to a human APOE nucleic acid were designed, as described in the tables below. “Start site” indicates the 5′-most nucleoside to which the modified oligonucleotide is complementary in the target nucleic acid sequence. “Stop site” indicates the 3′-most nucleoside to which the modified oligonucleotide is complementary in the target nucleic acid sequence. Each modified oligonucleotide listed in the tables below is 100% complementary to SEQ ID NO: 1 (described herein above), to SEQ ID NO: 2 (described herein above), or to both. ‘N/A’ indicates that the modified oligonucleotide is not 100% complementary to that particular target nucleic acid sequence.

[0728] The modified oligonucleotides in Table 56 are 5-10-5 MOE gapmers. The gapmers are 20 nucleosides in length, wherein the central gap segment consists of ten 2′-β-D-deoxynucleosides, and the 5′ and 3′ wing segments each consists of five 2′-MOE modified nucleosides. The sugar motif for the gapmers is (from 5′ to 3′): eeeeeddddddddddeeeee; wherein each ‘d’ represents a 2′-β-D-deoxyribosyl sugar moiety, and each ‘e’ represents a 2′-MOE modified sugar moiety. The gapmers have an internucleoside linkage motif of (from 5′ to 3′): sooosssssssssssooss; wherein each “s” represents a phosphorothioate internucleoside linkage, and each “o” represents a phosphodiester internucleoside linkage. Each cytosine residue is a 5-methyl cytosine.

TABLE 56
5-10-5 MOE gapmers with mixed PO/PS
internucleoside linkages complementary to human APOE

| | | SEQ | SEQ | SEQ | SEQ | |
|---|---|---|---|---|---|---|
| | | ID No: | ID No: | ID No: | ID No: | |
| Compound | | 1 Start | 1 Stop | 2 Start | 2 Stop | SEQ |
| Number | Sequence (5′ to 3′) | Site | Site | Site | Site | ID NO |
| 1401842 | CCTCATTTTAAAGTTCTCCA | 3201 | 3220 | N/A | N/A | 2522 |
| 1401843 | CCTCATTCTCCCTTCACATT | 3275 | 3294 | N/A | N/A | 2523 |
| 1401845 | GGGACACCCAGTAGGTGCTC | 3118 | 3137 | N/A | N/A | 2524 |
| 1401846 | TTCCTCATTCTCCCTTCACA | 3277 | 3296 | N/A | N/A | 2525 |
| 1401848 | GAGCTAATTCAGTCCTCATT | 3214 | 3233 | N/A | N/A | 2526 |
| 1401852 | TCCTCATTCTCCCTTCACAT | 3276 | 3295 | N/A | N/A | 2527 |
| 1401853 | CTCCAATCGACGGCTAGCTA | 3186 | 3205 | N/A | N/A | 2528 |
| 1401857 | TGAGCTAATTCAGTCCTCAT | 3215 | 3234 | N/A | N/A | 2529 |
| 1401861 | CATTCCTCATTCTCCCTTCA | 3279 | 3298 | N/A | N/A | 2530 |
| 1401862 | GCATTCCTCATTCTCCCTTC | 3280 | 3299 | N/A | N/A | 2531 |

[0729] The modified oligonucleotides in Table 57 are 5-10-5 MOE gapmers. The gapmers are 20 nucleosides in length, wherein the central gap segment consists of ten 2′-β-D-deoxynucleosides, and the 5′ and 3′ wing segments each consists of five 2′-MOE modified nucleosides. The sugar motif for the gapmers is (from 5′ to 3′): eeeeeddddddddddeeeee; wherein each ‘d’ represents a 2′-β-D-deoxyribosyl sugar moiety, and each ‘e’ represents a 2′-MOE modified sugar moiety. The gapmers have an internucleoside linkage motif of (from 5′ to 3′): soooossssssssssooss; wherein each “s” represents a phosphorothioate internucleoside linkage, and each “o” represents a phosphodiester internucleoside linkage. Each cytosine residue is a 5-methyl cytosine.

TABLE 57
5-10-5 MOE gapmers with mixed PO/PS
internucleoside linkages complementary to human APOE

| | | SEQ | SEQ | SEQ | SEQ | |
|---|---|---|---|---|---|---|
| | | ID No: | ID No: | ID No: | ID No: | |
| Compound | | 1 Start | 1 Stop | 2 Start | 2 Stop | SEQ |
| Number | Sequence (5′ to 3′) | Site | Site | Site | Site | ID NO |
| 1419518 | ATGCATTAGAAACCTCTAAC | 4187 | 4206 | N/A | N/A | 1697 |
| 1419519 | GTTGCATTATCTGCAACAGC | 3482 | 3501 | N/A | N/A | 1632 |
| 1419520 | CCTGCTATGGCTTACATCCC | 3070 | 3089 | N/A | N/A | 1669 |
| 1419521 | CTATGGCTTACATCCCAGTC | 3066 | 3085 | N/A | N/A | 1801 |
| 1419522 | TCTGGTATTCACTATCTGCC | 4211 | 4230 | N/A | N/A | 1899 |
| 1419523 | CCCTTCACATTCTAAGCTCC | 3266 | 3285 | N/A | N/A | 1188 |
| 1419524 | CTCATTTTAAAGTTCTCCAA | 3200 | 3219 | N/A | N/A | 1539 |
| 1419525 | CTCGATAAATGATAGTGACA | 3101 | 3120 | N/A | N/A | 1419 |
| 1419526 | GCATTATCTGCAACAGCCTA | 3479 | 3498 | N/A | N/A | 1830 |
| 1419527 | TCATTTTAAAGTTCTCCAAT | 3199 | 3218 | N/A | N/A | 1638 |
| 1419528 | TATGAGCTAATTCAGTCCTC | 3217 | 3236 | N/A | N/A | 1350 |
| 1419529 | CACATTCTAAGCTCCAACCT | 3261 | 3280 | N/A | N/A | 1521 |
| 1419530 | CCTCCATAGAAAATTCCATC | 3372 | 3391 | N/A | N/A | 1662 |
| 1419531 | TGCTCCACAAATGCTTCTTT | 4661 | 4680 | N/A | N/A | 1656 |
| 1419532 | CCTCATTTTAAAGTTCTCCA | 3201 | 3220 | N/A | N/A | 2522 |
| 1419533 | CAGCACATTTACCAAGCCGC | 3455 | 3474 | N/A | N/A | 855 |
| 1419534 | TCCTCATTTTAAAGTTCTCC | 3202 | 3221 | N/A | N/A | 1457 |
| 1419535 | TTCCATTTATGAGCTAATTC | 3224 | 3243 | N/A | N/A | 1750 |

[0730] The modified oligonucleotides in Table 58 are 5-10-5 MOE gapmers. The gapmers are 20 nucleosides in length, wherein the central gap segment consists of ten 2′-β-D-deoxynucleosides, and the 5′ and 3′ wing segments each consists of five 2′-MOE modified nucleosides. The sugar motif for the gapmers is (from 5′ to 3′): eeeeeddddddddddeeeee; wherein each represents a 2′-β-D-deoxyribosyl sugar moiety, and each ‘e’ represents a 2′-MOE modified sugar moiety. The gapmers have an internucleoside linkage motif of (from 5′ to 3′): sossssssssssssssoss; wherein each “s” represents a phosphorothioate internucleoside linkage, and each “o” represents a phosphodiester internucleoside linkage. Each cytosine residue is a 5-methyl cytosine.

TABLE 58
5-10-5 MOE gapmers with mixed PO/PS
internucleoside linkages complementary to human APOE

| | | SEQ | SEQ | SEQ | SEQ | |
|---|---|---|---|---|---|---|
| | | ID No: | ID No: | ID No: | ID No: | |
| Compound | | 1 Start | 1 Stop | 2 Start | 2 Stop | SEQ |
| Number | Sequence (5′ to 3′) | Site | Site | Site | Site | ID NO |
| 1449189 | CAGCACATTTACCAAGCCGC | 3455 | 3474 | N/A | N/A | 855 |
| 1449190 | CCTCATTTTAAAGTTCTCCA | 3201 | 3220 | N/A | N/A | 2522 |
| 1449191 | TATGAGCTAATTCAGTCCTC | 3217 | 3236 | N/A | N/A | 1350 |
| 1449192 | TTCCATTTATGAGCTAATTC | 3224 | 3243 | N/A | N/A | 1750 |
| 1449193 | TGGTGAATCTTTATTAAACT | 6363 | 6382 | 1265 | 1284 | 1193 |

[0731] The modified oligonucleotides in Table 59 are 3-10-3 cEt gapmers. The gapmers are 16 nucleosides in length, wherein the central gap segment consists of ten 2′-β-D-deoxynucleosides, and wherein the 5′ and 3′ wing segments each consist of three cEt modified nucleosides. The sugar motif for the gapmers is (from 5′ to 3′): kkkddddddddddkkk; wherein each represents a 2′-β-D-deoxyribosyl sugar moiety, and each 1′ represents a cEt sugar moiety. The gapmers have an internucleoside linkage motif of (from 5′ to 3′): soossssssssssos; wherein each “s” represents a phosphorothioate internucleoside linkage and each “o” represents a phosphodiester internucleoside linkage. Each cytosine residue is a 5-methyl cytosine.

TABLE 59
3-10-3 cEt gapmers with
mixed PO/PS internucleoside
linkages complementary to human APOE

| | | SEQ | SEQ | SEQ | SEQ | |
|---|---|---|---|---|---|---|
| | | ID | ID | ID | ID | |
| | | No: 1 | No: 1 | No: 2 | No: 2 | SEQ |
| Compound | Sequence | Start | Stop | Start | Stop | ID |
| Number | (5′ to 3′) | Site | Site | Site | Site | NO |
| 1335664 | GAAGCTAGAA | 5060 | 5075 | N/A | N/A | 2532 |
| | CCAGCA | | | | | |
| 1335669 | GTTTAATCAC | 4612 | 4627 | N/A | N/A | 2533 |
| | TTGGAA | | | | | |
| 1335682 | CCAATTATAG | 2758 | 2773 | 101 | 25 | 2534 |
| | GGCTCC | | | | | |

[0732] The modified oligonucleotides in Table 60 are 17 nucleosides in length. The sugar motif for each of the gapmers is (from 5′ to 3′): eeeeddddddddkkeee; wherein each ‘e’ represents a 2′-MOE modified sugar moiety, each represents a 2′-β-D-deoxyribosyl sugar moiety, and each 1′ represents a cEt sugar moiety. The gapmers each have an internucleoside linkage motif of (from 5′ to 3′): soosssssssssooss; wherein each “s” represents a phosphorothioate internucleoside linkage and each “o” represents a phosphodiester internucleoside linkage. Each cytosine residue is a 5-methyl cytosine.

TABLE 60
Modified oligonucleotides with mixed PO/PS
internucleoside linkages complementary to human APOE

| | | SEQ ID | SEQ ID | SEQ ID | SEQ ID | |
|---|---|---|---|---|---|---|
| | | No: 1 | No: 1 | No: 2 | No: 2 | |
| Compound | Sequence | Start | Stop | Start | Stop | SEQ |
| Number | (5′ to 3′) | Site | Site | Site | Site | ID NO |
| 1449171 | GTGAATCTTTATTAAAC | 6364 | 6380 | 1266 | 1282 | 2535 |
| 1449172 | CCTCATTTTAAAGTTCT | 3204 | 3220 | N/A | N/A | 2536 |
| 1449173 | CACATTTACCAAGCCGC | 3455 | 3471 | N/A | N/A | 2537 |
| 1449174 | GCACATTTACCAAGCCG | 3456 | 3472 | N/A | N/A | 2538 |
| 1449176 | CAGCACATTTACCAAGC | 3458 | 3474 | N/A | N/A | 2539 |
| 1449177 | CATTTATGAGCTAATTC | 3224 | 3240 | N/A | N/A | 2540 |
| 1449178 | CCATTTATGAGCTAATT | 3225 | 3241 | N/A | N/A | 2541 |
| 1449179 | TCCATTTATGAGCTAAT | 3226 | 3242 | N/A | N/A | 2542 |
| 1449180 | TTCCATTTATGAGCTAA | 3227 | 3243 | N/A | N/A | 2543 |
| 1449181 | GGTGAATCTTTATTAAA | 6365 | 6381 | 1267 | 1283 | 2544 |
| 1449182 | GAGCTAATTCAGTCCTC | 3217 | 3233 | N/A | N/A | 2545 |
| 1449183 | TGAGCTAATTCAGTCCT | 3218 | 3234 | N/A | N/A | 2546 |
| 1449184 | ATGAGCTAATTCAGTCC | 3219 | 3235 | N/A | N/A | 2547 |
| 1449185 | TATGAGCTAATTCAGTC | 3220 | 3236 | N/A | N/A | 2548 |
| 1449186 | CATTTTAAAGTTCTCCA | 3201 | 3217 | N/A | N/A | 2549 |
| 1449187 | TCATTTTAAAGTTCTCC | 3202 | 3218 | N/A | N/A | 2550 |
| 1449188 | CTCATTTTAAAGTTCTC | 3203 | 3219 | N/A | N/A | 2551 |

### Example 12: Activity of Modified Oligonucleotides Complementary to Human APOE in Transgenic Mice

[0733] ApoE4 transgenic mice (model #1549) were obtained from Taconic Biosciences. APOE transgenic mice were divided into groups of 4 mice each. Each mouse received a single intracerebroventricular (ICV) bolus of 100 μg, or 300 μg of modified oligonucleotide, as indicated in the tables below. A group of 4 mice received a single ICV bolus with PBS as a negative control, and the PCR values were normalized to this group.

[0734] Two weeks post treatment, mice were sacrificed and RNA was extracted from cortical brain tissue, and/or spinal cord for quantitative real-time RTPCR analysis of RNA expression of APOE using primer probe set RTS3073 (described herein above). Results are presented as percent change of RNA, relative to PBS control, normalized to mouse cyclophilin A (% control). Mouse cyclophilin A was amplified using primer probe set m_cyclo24 (forward sequence TCGCCGCTTGCTGCA, designated herein as SEQ ID NO: 16; reverse sequence ATCGGCCGTGATGTCGA, designated herein as SEQ ID NO: 17; probe sequence CCATGGTCAACCCCACCGTGTTC, designated herein as SEQ ID NO: 18). Data indicated as “n.d.” (no data) means that no data is available for that tissue for that compound.

[0735] As shown in the table below, treatment with modified oligonucleotides resulted in reduction of APOE RNA in comparison to the PBS control.

TABLE 61
Reduction of human APOE RNA in transgenic mice, 100 μg dose

| | APOE RNA |
|---|---|
| Compound No. | (% control) - CORTEX |
| PBS | 100 |
| 1335661 | 82 |
| 1335663 | 97 |
| 1335664 | 88 |
| 1335669 | 79 |
| 1335672 | 73 |
| 1335675 | 75 |
| 1335678 | 90 |
| 1335679 | 83 |
| 1335681 | 81 |
| 1335682 | 86 |
| 1335683 | 79 |

TABLE 62
Reduction of human APOE RNA in transgenic mice, 300 μg dose

| | APOE RNA |
|---|---|
| Compound No. | (% control) - CORTEX |
| PBS | 100 |
| 942665 | 92 |
| 942683 | 74 |
| 1335661 | 82 |
| 1335663 | 65 |
| 1335664 | 77 |
| 1335675 | 71 |
| 1335683 | 86 |
| 1401842 | 89 |
| 1401843 | 90 |
| 1401845 | 91 |
| 1401846 | 96 |
| 1401848 | 80 |
| 1401852 | 82 |
| 1401853 | 80 |
| 1401857 | 91 |
| 1401861 | 88 |
| 1401862 | 71 |

TABLE 63
Reduction of human APOE RNA in transgenic mice, 300 μg dose

| | APOE RNA |
|---|---|
| Compound No. | (% control) - CORTEX |
| PBS | 100 |
| 1419518 | 83 |
| 1419519 | 121 |
| 1419520 | 78 |
| 1419521 | 88 |
| 1419522 | 96 |
| 1419523 | 75 |
| 1419524 | 90 |
| 1419525 | 86 |
| 1419526 | 89 |
| 1419527 | 96 |
| 1419528 | 56 |
| 1419529 | 104 |
| 1419530 | 87 |
| 1419531 | 92 |
| 1419532 | 62 |
| 1419533 | 63 |
| 1419534 | 80 |
| 1419535 | 58 |

TABLE 64
Reduction of human APOE RNA in transgenic mice, 300 μg dose

| | |
|---|---|
| Compound | APOE RNA (% control) |

| No. | CORTEX | SPINAL CORD |
|---|---|---|
| PBS | 100 | 100 |
| 1449171 | 56 | 44 |
| 1449172 | 114 | 89 |
| 1449173 | 69 | 70 |
| 1449174 | 57 | 71 |
| 1449176 | 78 | 80 |
| 1449177 | 69 | 87 |
| 1449178 | 46 | 70 |
| 1449179 | 59 | 70 |
| 1449180 | 56 | 77 |
| 1449181 | 36 | 48 |
| 1449182 | 55 | 64 |
| 1449183 | 49 | 72 |
| 1449184 | 54 | 66 |
| 1449185 | 62 | 82 |
| 1449186 | 62 | 68 |
| 1449187 | 41 | 60 |
| 1449188 | 49 | 58 |
| 1449189 | 62 | 71 |
| 1449190 | 42 | 52 |
| 1449191 | 70 | 64 |
| 1449192 | 67 | 80 |
| 1449193 | 44 | 55 |

### Example 13: Activity of Modified Oligonucleotides Complementary to Human APOE in Knock-In Mice

[0736] APOE knock-in mice used in this study express the full-length human APOE gene knocked into the mouse locus. Humanization of APOE gene was done via CRISPR/Cas-9-mediated gene editing, allowing for generation of a model with constitutive expression of human APOE gene. Targeting strategy was based on NCBI transcripts NM_009696.4 (mouse) and NM_000041.4 (human). Mouse genomic sequence from exon 1 to exon 4 (including the 5′ and 3′ UTRs) was replaced with the human counterpart from 141 bp upstream of exon 1 to 28 bp downstream of exon 4. A plasmid allowing expression of Cas9 mRNA, specific gRNA, and the puromycin resistance cassette, and a plasmid containing the homology regions of the mouse APOE gene, and the replaced human region were co-transfected into the Taconic Biosciences C57BL/6N Tac ES cell line. Homologous recombination clones were isolated using positive puromycin selection, and humanized allele was obtained after Cas9-mediated gene editing. C57BL/6NTac-Apoeem7250_A-C03(APOE) Tac mice were used in these experiments, and are herein called APOE knock-in mice.

[0737] APOE knock-in mice were divided into groups of 2 mice each. Each mouse received a single ICV bolus of 300 μg of modified oligonucleotide. A group of 4 mice received a single ICV bolus with PBS as a negative control.

[0738] Two weeks post treatment, mice were sacrificed and RNA was extracted from cortical brain tissue, and spinal cord for quantitative real-time RTPCR analysis of RNA expression of APOE using primer probe set RTS3073 (described herein above). Results are presented as percent change of RNA, relative to PBS control, normalized to mouse cyclophilin A (% control). Mouse cyclophilin A was amplified using primer probe set m_cyclo24 (designated herein above). The values marked with a “t” indicate that the modified oligonucleotide is complementary to the amplicon region of the primer-probe set. In such cases, human primer-probe set RTS36365 (forward sequence CAGCGGAGGTGAAGGAC, designated herein as SEQ ID NO: 7; reverse sequence CAACGCAGCCCACAGAA, designated herein as SEQ ID NO: 8; probe sequence TCATCTTCCTGCCTGTGATTGGCC, designated herein as SEQ ID NO: 9) was used to confirm RNA expression of APOE.

[0739] As shown in the table below, treatment with modified oligonucleotides resulted in reduction of APOE RNA in comparison to the PBS control.

TABLE 65
Reduction of human APOE RNA in knock-in mice

| | APOE RNA (% control) | | APOE RNA (% control) | |
|---|---|---|---|---|
| | RTS3073 | | RTS36365 | |
| Compound | SPINAL | | SPINAL | |
| No. | CORD | CORTEX | CORD | CORTEX |
| PBS | 100 | 100 | 100 | 100 |
| 688711 | 64 | 78 | 64 | 78 |
| 688730 | 96 | 102 | 109 | 111 |
| 688775 | 103† | 92† | 111 | 98 |
| 688817 | 69 | 80 | 83 | 98 |
| 689046 | 45 | 52 | 48 | 55 |
| 729709 | 101 | 82 | 111 | 87 |
| 942364 | 80 | 92 | 90 | 99 |
| 942391 | 98† | 94† | 115 | 99 |
| 942393 | 99† | 96† | 114 | 110 |
| 942593 | 96 | 81 | 97 | 100 |
| 942728 | 78 | 78 | 89 | 91 |
| 1419528 | 83 | 82 | 90† | 93† |
| 1419533 | 79 | 89 | 81† | 97† |
| 1419535 | 77 | 91 | 81† | 93† |
| 1449190 | 67 | 73 | 70† | 81† |
| 1449193 | 61 | 59 | 72 | 71 |
| 1517154 | 80 | 72 | 77† | 82† |
| 1517173 | 89 | 90 | 89 | 95 |
| 1517222 | 90 | 87 | 89† | 85† |
| 1517226 | 80 | 70 | 84† | 69† |
| 1517228 | 94 | 86 | 95 | 90 |
| 1517234 | 106 | 87 | 101 | 93 |
| 1517246 | 78 | 78 | 75† | 79† |
| 1517248 | 89 | 93 | 87 | 91 |
| 1517254 | 52 | 57 | 53 | 56 |
| 1517281 | 71 | 81 | 77 | 84 |
| 1517311 | 76† | 100† | 72 | 104 |
| 1517316 | 90 | 98 | 94 | 107 |
| 1517356 | 94 | 91 | 95† | 96† |
| 1517372 | 115 | 96 | 116† | 101† |
| 1517383 | 81 | 69 | 73 | 72 |
| 1517394 | 129 | 103 | 117† | 111† |
| 1517508 | 77 | 71 | 63 | 73 |
| 1517529 | 226† | 97† | 175 | 108 |
| 1517561 | 85 | 96 | 87† | 102† |
| 1517564 | 108 | 95 | 108 | 103 |
| 1517641 | 107 | 99 | 101 | 102 |
| 1517651 | 100 | 99 | 96† | 105† |
| 1517652 | 90 | 79 | 78 | 87 |
| 1517663 | 103 | 105 | 96† | 141† |
| 1517732 | 87 | 89 | 102† | 100† |
| 1517770 | 33 | 35 | 40 | 39 |
| 1517853 | 65 | 53 | 70 | 65 |
| 1517891 | 65 | 49 | 77 | 66 |

TABLE 66
Reduction of human APOE RNA in knock-in mice

| | |
|---|---|
| Compound | APOE RNA (% control) |

| No. | SPINAL CORD | CORTEX |
|---|---|---|
| PBS | 100 | 100 |
| 689046 | 43.7‡ | 57‡ |
| 942594 | 83 | 107 |
| 942596 | 100 | 101 |
| 942684 | 85 | 85 |
| 1401848 | 79 | 87 |
| 1517718 | 91 | 85 |
| 1517841 | 78 | 73 |
| 1517885 | 63 | 58 |

‡Fewer than 2 samples available

TABLE 67
Reduction of human APOE RNA in knock-in mice

| | |
|---|---|
| Compound | APOE RNA (% control) |

| No. | SPINAL CORD | CORTEX |
|---|---|---|
| PBS | 100 | 100 |
| 1449193 | 65 | 71 |
| 1517770 | 28 | 35 |

### Example 14: Design of Modified Oligonucleotides Complementary to Human APOE Nucleic Acid

[0740] Modified oligonucleotides complementary to a human APOE nucleic acid were designed, as described in the tables below. “Start site” indicates the 5′-most nucleoside to which the modified oligonucleotide is complementary in the target nucleic acid sequence. “Stop site” indicates the 3′-most nucleoside to which the modified oligonucleotide is complementary in the target nucleic acid sequence. Each modified oligonucleotide listed in the tables below is 100% complementary to SEQ ID NO: 1 (described herein above), to SEQ ID NO: 2 (described herein above), or to both. ‘N/A’ indicates that the modified oligonucleotide is not 100% complementary to that particular target nucleic acid sequence.

[0741] The modified oligonucleotides in Table 56 are 6-10-4 MOE gapmers. The gapmers are 20 nucleosides in length. The sugar motif for the gapmers is (from 5′ to 3′): eeeeeeddddddddddeeee; wherein each ‘d’ represents a 2′-β-D-deoxyribosyl sugar moiety, and each ‘e’ represents a 2′-MOE modified sugar moiety. The gapmers have an internucleoside linkage motif of (from 5′ to 3′): sooooossssssssssoss; wherein each “s” represents a phosphorothioate internucleoside linkage, and each “o” represents a phosphodiester internucleoside linkage. Each cytosine residue is a 5-methyl cytosine.

TABLE 68
6-10-4 MOE gapmers with mixed PO/PS
internucleoside linkages complementary to human APOE

| | SEQ | SEQ | SEQ | SEQ | | |
|---|---|---|---|---|---|---|
| | ID No: | ID No: | ID No: | ID No: | | |
| Compound | 1 Start | 1 Stop | 2 Start | 2 Stop | | SEQ |
| Number | Site | Site | Site | Site | Sequence (5′ to 3′) | ID NO |
| 1601915 | 4761 | 4780 | 243 | 262 | GCTCCACCTTGGCCTGGCAT | 2934 |
| 1601916 | 3430 | 3449 | N/A | N/A | ACCCATTCCCTATTTAACTC | 1462 |
| 1601918 | 3070 | 3089 | N/A | N/A | CCTGCTATGGCTTACATCCC | 1669 |
| 1601924 | 3266 | 3285 | N/A | N/A | CCCTTCACATTCTAAGCTCC | 1188 |
| 1601926 | 3179 | 3198 | N/A | N/A | CGACGGCTAGCTACCGTGTC | 934 |
| 1601928 | 3284 | 3303 | N/A | N/A | TCTCGCATTCCTCATTCTCC | 1832 |
| 1601929 | 2970 | 2989 | N/A | N/A | GCTGCTTGCCTCACCCCCGC | 1376 |
| 1601931 | 4779 | 4798 | 261 | 280 | GCTCTGTCTCCACCGCTTGC | 1341 |
| 1601932 | 3405 | 3424 | N/A | N/A | TGGTCTTCTCTTATCTCCCC | 1586 |
| 1601934 | 3269 | 3288 | N/A | N/A | TCTCCCTTCACATTCTAAGC | 1705 |
| 1601937 | 3061 | 3080 | N/A | N/A | GCTTACATCCCAGTCCAGCT | 1254 |
| 1601938 | 2973 | 2992 | N/A | N/A | CCTGCTGCTTGCCTCACCCC | 1884 |
| 1601940 | 3297 | 3316 | N/A | N/A | ATCTCAGTCCCAGTCTCGCA | 1897 |
| 1601914 | 4613 | 4632 | N/A | N/A | AGTCGGTTTAATCACTTGGA | 1179 |
| 1601919 | 3424 | 3443 | N/A | N/A | TCCCTATTTAACTCCCTCCT | 1197 |
| 1601935 | 3283 | 3302 | N/A | N/A | CTCGCATTCCTCATTCTCCC | 1219 |
| 1601936 | 3408 | 3427 | N/A | N/A | TCCTGGTCTTCTCTTATCTC | 1322 |
| 1601939 | 3217 | 3236 | N/A | N/A | TATGAGCTAATTCAGTCCTC | 1350 |
| 1601945 | 3220 | 3239 | N/A | N/A | ATTTATGAGCTAATTCAGTC | 1874 |
| 1601951 | 4212 | 4231 | N/A | N/A | GTCTGGTATTCACTATCTGC | 942 |
| 1601952 | 3414 | 3433 | N/A | N/A | ACTCCCTCCTGGTCTTCTCT | 1718 |
| 1601954 | 3403 | 3422 | N/A | N/A | GTCTTCTCTTATCTCCCCAT | 1687 |
| 1601960 | 4206 | 4225 | N/A | N/A | TATTCACTATCTGCCTGCAA | 1385 |

### Example 15: Design of RNAi Compounds with Antisense RNAi Oligonucleotides Complementary to a Human APOE Nucleic Acid

[0742] RNAi compounds comprising antisense RNAi oligonucleotides complementary to a human APOE nucleic acid and sense RNAi oligonucleotides complementary to the antisense RNAi oligonucleotides were designed as follows.

[0743] The RNAi compounds in the tables below consist of an antisense RNAi oligonucleotide and a sense RNAi oligonucleotide. The antisense RNAi oligonucleotide in each case is 23 nucleosides in length; has a sugar motif (from 5′ to 3′) of: efyyyfyyyyyyyfyfyyyyyyy; wherein ‘e’ represents a 2′-MOE modified sugar moiety, each “y” represents a 2′-O-methylribosyl sugar, and each “f” represents a 2′-fluororibosyl sugar; and an internucleoside linkage motif (from 5′ to 3′) of: ssooooooooooooooooooss; wherein ‘o’ represents a phosphodiester internucleoside linkage and ‘s’ represents a phosphorothioate internucleoside linkage. Each antisense RNAi oligonucleotide described in the table below has a 5′-(E)-Vinylphosphonate on the 5′ end of the compound.

[0744] The sense RNAi oligonucleotide in each case is 21 nucleosides in length; has a sugar motif (from 5′ to 3′) of: yyyyyyfyfffyyyyyyyyyy; wherein each “y” represents a 2′-O-methylribosyl sugar, and each “f” represents a 2′-fluororibosyl sugar; and an internucleoside linkage motif (from 5′ to 3′) of: ssooooooooooooooooss; wherein ‘o’ represents a phosphodiester internucleoside linkage and ‘s’ represents a phosphorothioate internucleoside linkage. Each antisense RNAi oligonucleotides is complementary to the target nucleic acid (APOE), and each sense RNAi oligonucleotides is complementary to the first of the 21 nucleosides of the antisense RNAi oligonucleotide (from 5′ to 3′) wherein the last two 3′-nucleosides of the antisense RNAi oligonucleotides are not paired with the sense RNAi oligonucleotide (are overhanging nucleosides). Further, the RNAi sense oligonucleotides are conjugated to a [3nC7-C16] moiety at the 3′ end. “[3nC7-C16]” represents a palmitate moiety linked to a 3′-C7 amino modifier, as shown below, which is attached to the 3′-nucleoside via a phosphodiester linkage.

[chemical structure]

[0745] “Start site” indicates the 5′-most nucleoside to which the modified oligonucleotide is complementary in the target nucleic acid sequence. “Stop site” indicates the 3′-most nucleoside to which the modified oligonucleotide is complementary in the target nucleic acid sequence. Each modified antisense RNAi oligonucleoside listed in the tables below is complementary to SEQ ID NO: 2 (described herein above), with a single mismatch to SEQ ID NO: 2 (described herein above) located at position 1 on 5′ end of the antisense strand. The non-complementary nucleobase is marked in the Antisense Sequence column in

[symbol]

TABLE 69A
RNAi compounds targeting human APOE

| | | | | SEQ ID | SEQ ID |
|---|---|---|---|---|---|
| | Anti- | | | NO: 2 | NO: 2 |
| | sense | | | Anti- | Anti- |
| | RNAi | | SEQ | sense | sense |
| Compound | Oligo | Antisense | ID | Start | Stop |
| Number | ID | Sequence (5′ to 3′) | NO | Site | Site |
| 1642901 | 1628239 | [symbol] AUCUUUAUUAAACUAGGGUCCA | 2935 | 1257 | 1278 |
| 1644690 | 1628956 | [symbol] AACUUGGUGAAUCUUUAUUAAA | 2936 | 1267 | 1288 |
| 1644691 | 1628970 | [symbol] GACAGGGUCUCCCGCUGCAGGC | 2937 | 1211 | 1232 |
| 1644692 | 1628972 | [symbol] AGGGUCUCCCGCUGCAGGCUGC | 2938 | 1208 | 1229 |
| 1644693 | 1628974 | [symbol] GCUCGAACCAGCUCUUGAGGCG | 2939 | 1030 | 1051 |

TABLE 69B
RNAi compounds targeting human APOE

| | Sense | | SEQ |
|---|---|---|---|
| Compound | RNAi | Sense | ID |
| Number | oligo ID | Sequence (5′ to 3′) | NO |
| 1642901 | 1628318 | GACCCUAGUUUAAUAAAGAUA | 2940 |
| 1644690 | 1640442 | UAAUAAAGAUUCACCAAGUUA | 2941 |
| 1644691 | 1640443 | CUGCAGCGGGAGACCCUGUCA | 2942 |
| 1644692 | 1640444 | AGCCUGCAGCGGGAGACCCUA | 2943 |
| 1644693 | 1640445 | CCUCAAGAGCUGGUUCGAGCA | 2944 |

### Example 16: Activity of Modified Oligonucleotides and RNAi Compounds that Target Human APOE in Knock-In Mice

[0746] ApoE4 knock-in mice (C57BL/6NTac-Apoeem7250_A-C03(APOE)Tac) were obtained from Taconic Biosciences. APOE knock-in mice were divided into groups of 2 mice each. Each mouse received a single ICV bolus of 300 μg of modified oligonucleotide or a single ICV bolus of 300 μg of RNAi compound. A group of 4 mice received a single ICV bolus with PBS as a negative control.

[0747] Two weeks post treatment, mice were sacrificed and RNA was extracted from cortical brain tissue, and spinal cord for quantitative real-time RTPCR analysis of RNA expression of APOE using primer probe set RTS3073 (described herein above). Results are presented as percent change of RNA, relative to PBS control, normalized to mouse cyclophilin A (% control). Mouse cyclophilin A was amplified using primer probe set m_cyclo24 (designated herein above).

[0748] As shown in the table below, treatment with modified oligonucleotides resulted in reduction of APOE RNA in comparison to the PBS control.

TABLE 70
Reduction of human APOE RNA in knock-in mice

| | |
|---|---|
| Compound | APOE RNA (% control) |

| No. | SPINAL CORD | CORTEX |
|---|---|---|
| 1601915 | 75 | 93 |
| 1601916 | 110 | 95 |
| 1601918 | 90 | 92 |
| 1601924 | 114 | 100 |
| 1601926 | 117 | 91 |
| 1601928 | 103 | 96 |
| 1601929 | 118 | 100 |
| 1601931 | 78 | 80 |
| 1601932 | 82 | 89 |
| 1601934 | 118 | 98 |
| 1601937 | 87 | 79 |
| 1601938 | 201 | 166 |
| 1601940 | 95 | 70 |

TABLE 71
Reduction of human APOE RNA in knock-in mice

| | |
|---|---|
| Compound | APOE RNA (% control) |

| No. | SPINAL CORD | CORTEX |
|---|---|---|
| PBS | 100 | 100 |
| 1601914 | 74 | 79 |
| 1601919 | 87 | 89 |
| 1601935 | 53 | 69 |
| 1601936 | 88 | 92 |
| 1601939 | 85 | 91 |
| 1601945 | 104 | 102 |
| 1601951 | 58 | 82 |
| 1601952 | 100 | 98 |
| 1601954 | 81 | 78 |
| 1601960 | 82 | 67 |
| 1642901 | 4 | 13 |
| 1644690 | 3‡ | 5‡ |
| 1644691 | 15 | 62 |
| 1644692 | 17 | 47 |

‡Fewer than 2 samples available

TABLE 72
Reduction of human APOE RNA in knock-in mice

| | |
|---|---|
| Compound | APOE RNA (% control) |

| No. | SPINAL CORD | CORTEX |
|---|---|---|
| 1644693 | 12 | 76 |
| 1644690 | 5 | 28 |

The application's sequence listing, which the Patent Office published only in electronic form, follows.

SEQUENCE LISTING (2944 sequences)

SEQ ID NO: 1 - DNA, 9000 bp, Homo sapiens
acgcctctcacctcagctcttccctgcaggctctgtggatagcaactggatcgtgggtgccacgctggagaagaagctcccacccctgcccctgacactggcccttggggccttcctgaatcaccgcaagaacaagtttcagtgtggctttggcctcaccatcggctgagccctcctggcccccgccttccacgcccttccgattccacctccacctccacctccccctgccacagaggggagacctgagcccccctcccttccctccccccttgggggtcgggggggacattggaaaggagggaccccgccaccccagcagctgaggaggggattctggaactgaatggcgcttcgggattctgagtagcaggggcagcatgcccagtgggcctggggtcccgggagggattccggaattgaggggcacgcaggattctgagcaccaggggcagaggcggccagacaacctcagggaggagtgtcctggcgtccccatcctccaaagggcctgggcccgccccgagggggcagcgagaggagcttccccatccccggtcagtccaccctgccccgtccactttcccatctcctcggtataaatcatgtttataagttatggaagaaccgggacattttacagaaaaaaaacaaaaaacaacaaaaaatatacgtgggaaaaaaaacgatgggaggcctccgttttctcaagtgtgtctggcctgttttgagcatttcatccggagtctggccgccctgaccttcccccagccgcctgcagggggcgccagagggccggagcacggaaagcagcggatccttgatgctgccttaagtccggctcagaggggcgcagcgtggcctggggtcgctatcttcccatccggaacatctgccctgctgggggacactacgggccttcccttgcctgagggtagggtctcaaggtcacttgcccccagcttgacctggccggagtggctatagaggactttgtccctgcagactgcagcagcagagatgacactgtctctgagtgcagagatgggggcagggagctgggagagggttcaagctactggaacagcttcagaacaactagggtactaggaactgctgtgtcagggagaaggggctcaaggactcgcaggcctgggaggaggggcctaggccagccatgggagttgggtcacctgtgtctgaggacttggtgctgtctggattttgccaacctagggctggggtcagctgatgcccaccacgactcccgagcctccaggaactgaaaccctgtctgcccccagggtctggggaaggaggctgctgagtagaaccaaccccaggttaccaaccccacctcagccaccccttgccagccaaagcaaacaggcccggcccggcactgggggttccttctcgaaccaggagttcagcctcccctgacccgcagaatcttctgatcccacccgctccaggagccaggaatgagtcccagtctctcccagttctcactgtgtggttttgccattcgtcttgctgctgaaccacgggtttctcctctgaaacatctgggatttataacagggcttaggaaagtgacagcgtctgagcgttcactgtggcctgtccattgctagccctaacataggaccgctgtgtgccagggctgtcctccatgctcaatacacgttagcttgtcaccaaacatacccgtgccgctgctttcccagtctgatgagcaaaggaacttgatgctcagagaggacaagtcatttgcccaaggtcacacagctggcaactggcagagccaggattcacgccctggcaatttgactccagaatcctaaccttaacccagaagcacggcttcaagcccctggaaaccacaatacctgtggcagccagggggaggtgctggaatctcatttcacatgtggggagggggctcccctgtgctcaaggtcacaaccaaagaggaagctgtgattaaaacccaggtcccatttgcaaagcctcgacttttagcaggtgcatcatactgttcccacccctcccatcccacttctgtccagccgcctagccccactttcttttttttctttttttgagacagtctccctcttgctgaggctggagtgcagtggcgagatctcggctcactgtaacctccgcctcccgggttcaagcgattctcctgcctcagcctcccaagtagctaggattacaggcgcccgccaccacgcctggctaacttttgtatttttagtagagatggggtttcaccatgttggccaggctggtctcaaactcctgaccttaagtgattcgcccactgtggcctcccaaagtgctgggattacaggcgtgagctaccgcccccagcccctcccatcccacttctgtccagccccctagccctactttctttctgggatccaggagtccagatccccagccccctctccagattacattcatccaggcacaggaaaggacagggtcaggaaaggaggactctgggcggcagcctccacattccccttccacgcttggcccccagaatggaggagggtgtctgtattactgggcgaggtgtcctcccttcctggggactgtggggggtggtcaaaagacctctatgccccacctccttcctccctctgccctgctgtgcctggggcagggggagaacagcccacctcgtgactgggggctggcccagcccgccctatccctgggggagggggcgggacagggggagccctataattggacaagtctgggatccttgagtcctactcagccccagcggaggtgaaggacgtccttccccaggagccggtgagaagcgcagtcgggggcacggggatgagctcaggggcctctagaaagagctgggaccctgggaacccctggcctccaggtagtctcaggagagctactcggggtcgggcttggggagaggaggagcgggggtgaggcaagcagcaggggactggacctgggaagggctgggcagcagagacgacccgacccgctagaaggtggggtggggagagcagctggactgggatgtaagccatagcaggactccacgagttgtcactatcatttatcgagcacctactgggtgtccccagtgtcctcagatctccataactggggagccaggggcagcgacacggtagctagccgtcgattggagaactttaaaatgaggactgaattagctcataaatggaacacggcgcttaactgtgaggttggagcttagaatgtgaagggagaatgaggaatgcgagactgggactgagatggaaccggcggtggggagggggtggggggatggaatttgaaccccgggagaggaagatggaattttctatggaggccgacctggggatggggagataagagaagaccaggagggagttaaatagggaatgggttgggggcggcttggtaaatgtgctgggattaggctgttgcagataatgcaacaaggcttggaaggctaacctggggtgaggccgggttggggccgggctgggggtgggaggagtcctcactggcggttgattgacagtttctccttccccagactggccaatcacaggcaggaagatgaaggttctgtgggctgcgttgctggtcacattcctggcaggtatgggggcggggcttgctcggttccccccgctcctccccctctcatcctcacctcaacctcctggccccattcaggcagaccctgggccccctcttctgaggcttctgtgctgcttcctggctctgaacagcgatttgacgctctctgggcctcggtttcccccatccttgagataggagttagaagttgttttgttgttgttgtttgttgttgttgttttgtttttttgagatgaagtctcgctctgtcgcccaggctggagtgcagtggcgggatctcggctcactgcaagctccgcctcccaggtccacgccattctcctgcctcagcctcccaagtagctgggactacaggcacatgccaccacacccgactaacttttttgtattttcagtagagacggggtttcaccatgttggccaggctggtctggaactcctgacctcaggtgatctgcccgtttcgatctcccaaagtgctgggattacaggcgtgagccaccgcacctggctgggagttagaggtttctaatgcattgcaggcagatagtgaataccagacacggggcagctgtgatctttattctccatcacccccacacagccctgcctggggcacacaaggacactcaatacatgcttttccgctgggcgcggtggctcacccctgtaatcccagcactttgggaggccaaggtgggaggatcacttgagcccaggagttcaacaccagcctgggcaacatagtgagaccctgtctctactaaaaatacaaaaattagccaggcatggtgccacacacctgtgctctcagctactcaggaggctgaggcaggaggatcgcttgagcccagaaggtcaaggttgcagtgaaccatgttcaggccgctgcactccagcctgggtgacagagcaagaccctgtttataaatacataatgctttccaagtgattaaaccgactcccccctcaccctgcccaccatggctccaaagaagcatttgtggagcaccttctgtgtgcccctaggtactagatgcctggacggggtcagaaggaccctgacccaccttgaacttgttccacacaggatgccaggccaaggtggagcaagcggtggagacagagccggagcccgagctgcgccagcagaccgagtggcagagcggccagcgctgggaactggcactgggtcgcttttgggattacctgcgctgggtgcagacactgtctgagcaggtgcaggaggagctgctcagctcccaggtcacccaggaactgaggtgagtgtccccatcctggcccttgaccctcctggtgggcggctatacctccccaggtccaggtttcattctgcccctgtcgctaagtcttggggggcctgggtctctgctggttctagcttcctcttcccatttctgactcctggctttagctctctggaattctctctctcagctttgtctctctctcttcccttctgactcagtctctcacactcgtcctggctctgtctctgtccttccctagctcttttatatagagacagagagatggggtctcactgtgttgcccaggctggtcttgaacttctgggctcaagcgatcctcccgcctcggcctcccaaagtgctgggattagaggcatgagccaccttgcccggcctcctagctccttcttcgtctctgcctctgccctctgcatctgctctctgcatctgtctctgtctccttctctcggcctctgccccgttccttctctccctcttgggtctctctggctcatccccatctcgcccgccccatcccagcccttctccccgcctcccactgtgcgacaccctcccgccctctcggccgcagggcgctgatggacgagaccatgaaggagttgaaggcctacaaatcggaactggaggaacaactgaccccggtggcggaggagacgcgggcacggctgtccaaggagctgcaggcggcgcaggcccggctgggcgcggacatggaggacgtgtgcggccgcctggtgcagtaccgcggcgaggtgcaggccatgctcggccagagcaccgaggagctgcgggtgcgcctcgcctcccacctgcgcaagctgcgtaagcggctcctccgcgatgccgatgacctgcagaagcgcctggcagtgtaccaggccggggcccgcgagggcgccgagcgcggcctcagcgccatccgcgagcgcctggggcccctggtggaacagggccgcgtgcgggccgccactgtgggctccctggccggccagccgctacaggagcgggcccaggcctggggcgagcggctgcgcgcgcggatggaggagatgggcagccggacccgcgaccgcctggacgaggtgaaggagcaggtggcggaggtgcgcgccaagctggaggagcaggcccagcagatacgcctgcaggccgaggccttccaggcccgcctcaagagctggttcgagcccctggtggaagacatgcagcgccagtgggccgggctggtggagaaggtgcaggctgccgtgggcaccagcgccgcccctgtgcccagcgacaatcactgaacgccgaagcctgcagccatgcgaccccacgccaccccgtgcctcctgcctccgcgcagcctgcagcgggagaccctgtccccgccccagccgtcctcctggggtggaccctagtttaataaagattcaccaagtttcacgcatctgctggcctccccctgtgatttcctctaagccccagcctcagtttctctttctgcccacatactggccacacaattctcagccccctcctctccatctgtgtctgtgtgtatctttctctctgcccttttttttttttttagacggagtctggctctgtcacccaggctagagtgcagtggcacgatcttggctcactgcaacctctgcctcttgggttcaagcgattctgctgcctcagtagctgggattacaggctcacaccaccacacccggctaatttttgtatttttagtagagacgagctttcaccatgttggccaggcaggtctcaaactcctgaccaagtgatccacccgccggcctcccaaagtgctgagattacaggcctgagccaccatgcccggcctctgcccctctttcttttttagggggcagggaaaggtctcaccctgtcacccgccatcacagctcactgcagcctccacctcctggactcaagtgataagtgatcctcccgcctcagcctttccagtagctgagactacaggcgcataccactaggattaatttgggggggggggtggtgtgtgtggagatggggtctggctttgttggccaggctgatgtggaattcctgggctcaagcgatactcccaccttggcctcctgagtagctgagactactggctagcaccaccacacccagctttttattattatttgtagagacaaggtctcaatatgttgcccaggctagtctcaaacccctgggctcaagagatcctccgccatcggcctcccaaagtgctgggattccaggcatggggctccgagcccggcctgcccaacttaataatacttgttcctcagagttgcaactccaaatgacctgagattggtgcctttattctaagctattttcattttttttctgctgtcattattctcccccttctctcctccagtcttatctgatatctgcctccttcccacccaccctgcaccccatcccacccctctgtctctccctgttctcctcaggagactctggcttcctgttttcctccacttctatcttttatctctccctcctacggtttcttttctttctccccggcctgcttgtttctcccccaacccccttcatctggatttcttcttctgccattcagtttggtttgagctctctgcttctccggttccctctgagctagctgtcccttcacccactgtgaactgggtttccctgcccaaccctcattctctttctttctttctttttttttttttttttttttttttttttttgagacagagtcttgctctgttgcccagcctggagtgcagtggtgcaatcttggttcactgcaacctccacttcccagattcaagcaattctcctgcctcagcctccagagtagctgggattacaggcgtgtcccaccacacccgactaatttttgtatttttggtagagacaaggcttcggcattgttggccaggcaggtctcgaactcctgacctcaagtaatctgcctgcctcaccctcccaaagtgctgggattacaggcatgagccacctcacccggaccatccctcattctccatcctttcctccagttgtgatgtctacccctcatgtttcccaacaagcctactgggtgctgaatccaggctgggaagagaagggagcggctcttctgtcggagtctgcaccaggcccatgctgagacgagagctggcgctcagagaggggaagcttggatggaagcccaggagccgccggcactctcttctcctcccaccccctcagttctcagagacggggaggagggttcccaccaacgggggacaggctgagacttgagcttgtatctcctgggccagctgcaacatctgcttgtccctctgcccatcttggctcctgcacaccctgaacttggtgctttccctggcactgctctgatcacccacgtggaggcagcacccctcccctggagatgactcaccagggctgagtgaggaggggaagggtcagtgtgctcacaggcagggggcctggtctgctgggcctgctgctgattcaccgtatgtccaggagctggagcagcaccctctcagagcctcagtttccccagatgtcaatgagagaatcagcatcagccacatctcccacctgaagaatcgaaccttgagttctcacctttaagaatttttttttttttttgagacagtgccttgctcagtcgaccacgctggagtgcagtagcacgatcatcaatcactgcagcctccaactcaagcaaccctcctgcctcaacctcctgagtagctggggccacaggcacccaccaccatgcctggctaattctttcttttttgagatggagtctcactctgtcgcccaggctggagtgcagtggcaccatcttggctcaccgcaacctctgccccccgggttcaagcaattctcctgcctcagcctcctgagtagctagaattacaggcgcacaccaccacaccaggctaatttttgtatttttagtagaaacgaggtttcaccacggtggtcaggttggtctcaaactcctgacatcaggtga

SEQ ID NO: 2 - DNA, 1316 bp, Homo sapiens
gggacagggggagccctataattggacaagtctgggatccttgagtcctactcagccccagcggaggtgaaggacgtccttccccaggagccggtgagaagcgcagtcgggggcacggggatgagctcaggggcctctagaaagagctgggaccctgggaacccctggcctccagactggccaatcacaggcaggaagatgaaggttctgtgggctgcgttgctggtcacattcctggcaggatgccaggccaaggtggagcaagcggtggagacagagccggagcccgagctgcgccagcagaccgagtggcagagcggccagcgctgggaactggcactgggtcgcttttgggattacctgcgctgggtgcagacactgtctgagcaggtgcaggaggagctgctcagctcccaggtcacccaggaactgagggcgctgatggacgagaccatgaaggagttgaaggcctacaaatcggaactggaggaacaactgaccccggtggcggaggagacgcgggcacggctgtccaaggagctgcaggcggcgcaggcccggctgggcgcggacatggaggacgtgtgcggccgcctggtgcagtaccgcggcgaggtgcaggccatgctcggccagagcaccgaggagctgcgggtgcgcctcgcctcccacctgcgcaagctgcgtaagcggctcctccgcgatgccgatgacctgcagaagcgcctggcagtgtaccaggccggggcccgcgagggcgccgagcgcggcctcagcgccatccgcgagcgcctggggcccctggtggaacagggccgcgtgcgggccgccactgtgggctccctggccggccagccgctacaggagcgggcccaggcctggggcgagcggctgcgcgcgcggatggaggagatgggcagccggacccgcgaccgcctggacgaggtgaaggagcaggtggcggaggtgcgcgccaagctggaggagcaggcccagcagatacgcctgcaggccgaggccttccaggcccgcctcaagagctggttcgagcccctggtggaagacatgcagcgccagtgggccgggctggtggagaaggtgcaggctgccgtgggcaccagcgccgcccctgtgcccagcgacaatcactgaacgccgaagcctgcagccatgcgaccccacgccaccccgtgcctcctgcctccgcgcagcctgcagcgggagaccctgtccccgccccagccgtcctcctggggtggaccctagtttaataaagattcaccaagtttcacgcatcaaaaaaaaaaaaaaaaaaa

SEQ ID NO: 3 - DNA, 774 bp, Homo sapiens
  misc_feature (415)..(415): n is a, c, g, or t
  misc_feature (628)..(628): n is a, c, g, or t
  misc_feature (674)..(674): n is a, c, g, or t
  misc_feature (728)..(728): n is a, c, g, or t
tactcagccccagcggaggtgaaggacgtccttccccaggagccgactggccaatcacaggcaggaagatgaaggttctgtgggctgcgttgctggtcacattcctggcaggatgccagccaaggtggagcaagcggtggagacagagccggagcccgagctgcgccacagaccgagtggcagagcggccagcgctgggaactggcactgggtcgcttttgggattacctgcgctgggtgcagacactgtctgagcagtgcagaggagctgctcaatcccaggtcacccaggaactgagggcgctgatggacgagaccatgaaggagttgaaggcctacaaatcggaactggaggaacaactgaccccggtggcggaggagacgcgggcacggctgtccaaggagctgcaggcgncgcaggcccggctgggcgcggacatggaggacgtgtgcggccgcctggtgcagtaccgcggccgaggtgcaggccatgctcggccagagcaccgaggagctgcgggtgcgcctcgcctcccacctgcgcaactgcgtaacggctcctccgcgatgccgatgacctgcagaagcgcctggcagtgtaccaggccggggcccgcgaagcgccgancgcggcctcagcgccatccgcgagcgcctggggcccctggtggaanagggccgcgtgcgggcccgccactgttgggctcccttggccggccaaccgctanaggagtggaccctaagtttaataaagattccccaagttttcacgcc

SEQ ID NO: 4 - DNA, 884 bp, Homo sapiens
agcggacttagccccagcggaggtgaaggacgtccttccccaggagccggtgagaagcgcagtcgggggcacggggatgagctcaggggcctctagaaagagctgggaccctgggaagccctggcctccagactggccaatcacaggcaggaagatgaaggttctgtgggctgcgttgctggtcacattcctggcaggatgccaggccaaggtggagcaagcggtggagacagagccggagcccgagctgcgccagcagaccgagtggcagagcggccagcgctgggaactggcactgggtcgcttttgggattacctgcgctgggtgcagacactgtctgagcaggtgcaggaggagctgctcagctcccaggtcacccaggaactgagggcgctgatggacgagaccatgaaggagttgaaggcctacaaatcggaactggaggaacaactgaccccggtggcggaggagacgcgggcacggctgtccaaggagctgcaggcggcgcaggcccggctgggcgcggacatggaggacgtgtgcggccgcctggtgcagtaccgcggcgaggtgcaggccatgctcggccagagcaccgaggagctgcgggtgcgcctcgcctcccacctgcgcaagctgcgtaagcggctcctccgcgatgccgatgacctgcagaagcgcctggcagtgtacgaggccggggcccggagggcgccgagcgcggcctcagcgccatccgcgagcgcctggggccctggtggaacagggccgggtgcggccggcactgtgggctccctgagccgggccagccgctacaggagcgggccaggcctggggagaaccggttgaacacgcggatggagagaaatgggcagcgggaccg

SEQ ID NO: 5 - DNA, 704 bp, Homo sapiens
  misc_feature (25)..(25): n is a, c, g, or t
agaattcggcacgaggcaggtcacncaggaactgagggcgctgcgggtgcgcctcgcctcccacctgcgcaagctgcgtaagcggctcctccgcgatgccgatgacctgcagaagtgcctggcagtgtaccaggccggggcccgcgagggcgccgagcgcggcctcagcgccatccgcgagcgcctggggcccctggtggaacagggccgcgtgcgggccgccactgtgggctccctggccggccagccgctacaggagcgggcccaggcctggggcgagcggctgcgcgcgcggatggaggagatgggcagccggacccgcgaccgcctggacgaggtgaaggagcaggtggcggaggtgcgcgccaagctggaggagcaggcccagcagatacgcctgcaggccgaggccttccaggcccgcctcaagagctggttcgagcccctggtggaagacatgcagcgccagtgggccgggctggtggagaaggtgcaggctgccgtgggcaccagcgccgcccctgtgcccagcgacaatcactgaacgccgaagcctgcagccatgcgaccccacgccaccccgtgcctcctgcctccgcgcagcctgcagcgggagaccctgtccccgccccagccgtcctcctggggtggaccctagtttaataaagattcaccaagtttcacgcaaaaaaaaaaaaaaaaaa

SEQ ID NO: 6 - DNA, 1223 bp, Homo sapiens
gggatccttgagtcctactcagccccagcggaggtgaaggacgtccttccccaggagccgactggccaatcacaggcaggaagatgaaggttctgtgggctgcgttgctggtcacattcctggcaggatgccaggccaaggtggagcaagcggtggagacagagccggagcccgagctgcgccagcagaccgagtggcagagcggccagcgctgggaactggcactgggtcgcttttgggattacctgcgctgggtgcagacactgtctgagcaggtgcaggaggagctgctcagctcccaggtcacccaggaactgagggcgctgatggacgagaccatgaaggagttgaaggcctacaaatcggaactggaggaacaactgaccccggtggcggaggagacgcgggcacggctgtccaaggagctgcaggcggcgcaggcccggctgggcgcggacatggaggacgtgtgcggccgcctggtgcagtaccgcggcgaggtgcaggccatgctcggccagagcaccgaggagctgcgggtgcgcctcgcctcccacctgcgcaagctgcgtaagcggctcctccgcgatgccgatgacctgcagaagcgcctggcagtgtaccaggccggggcccgcgagggcgccgagcgcggcctcagcgccatccgcgagcgcctggggcccctggtggaacagggccgcgtgcgggccgccactgtgggctccctggccggccagccgctacaggagcgggcccaggcctggggcgagcggctgcgcgcgcggatggaggagatgggcagccggacccgcgaccgcctggacgaggtgaaggagcaggtggcggaggtgcgcgccaagctggaggagcaggcccagcagatacgcctgcaggccgaggccttccaggcccgcctcaagagctggttcgagcccctggtggaagacatgcagcgccagtgggccgggctggtggagaaggtgcaggctgccgtgggcaccagcgccgcccctgtgcccagcgacaatcactgaacgccgaagcctgcagccatgcgaccccacgccaccccgtgcctcctgcctccgcgcagcctgcagcgggagaccctgtccccgccccagccgtcctcctggggtggaccctagtttaataaagattcaccaagtttcacgcaaaaaaaaaaaaaaaaaaaaaaaaaaaaaaaaaaaaaaaaaaaa

SEQ ID NO: 7 - DNA, 17 bp, Artificial sequence
  Primer
cagcggaggtgaaggac

SEQ ID NO: 8 - DNA, 17 bp, Artificial sequence
  Primer
caacgcagcccacagaa

SEQ ID NO: 9 - DNA, 24 bp, Artificial sequence
  Probe
tcatcttcctgcctgtgattggcc

SEQ ID NO: 10 - DNA, 20 bp, Artificial sequence
  Primer
tgggtcgcttttgggattac

SEQ ID NO: 11 - DNA, 18 bp, Artificial sequence
  Primer
ccatcagcgccctcagtt

SEQ ID NO: 12 - DNA, 23 bp, Artificial sequence
  Probe
ctgctcagctcccaggtcaccca

SEQ ID NO: 13 - DNA, 18 bp, Artificial sequence
  Primer
cgcctggacgaggtgaag

SEQ ID NO: 14 - DNA, 17 bp, Artificial sequence
  Primer
ccactggcgctgcatgt

SEQ ID NO: 15 - DNA, 21 bp, Artificial sequence
  Probe
ttccaggcccgcctcaagagc

SEQ ID NO: 16 - DNA, 15 bp, Artificial sequence
  Primer
tcgccgcttgctgca

SEQ ID NO: 17 - DNA, 17 bp, Artificial sequence
  Primer
atcggccgtgatgtcga

SEQ ID NO: 18 - DNA, 23 bp, Artificial sequence
  Probe
ccatggtcaaccccaccgtgttc

SEQ ID NO: 19 - skipped

SEQ ID NO: 20 - DNA, 20 bp, Artificial sequence
  Synthetic oligonucleotide
gagtaggactcaaggatccc

SEQ ID NO: 21 - DNA, 20 bp, Artificial sequence
  Synthetic oligonucleotide
gcagcccacagaaccttcat

SEQ ID NO: 22 - DNA, 20 bp, Artificial sequence
  Synthetic oligonucleotide
aacgcagcccacagaacctt

SEQ ID NO: 23 - DNA, 20 bp, Artificial sequence
  Synthetic oligonucleotide
tgaccagcaacgcagcccac

SEQ ID NO: 24 - DNA, 20 bp, Artificial sequence
  Synthetic oligonucleotide
ggaatgtgaccagcaacgca

SEQ ID NO: 25 - DNA, 20 bp, Artificial sequence
  Synthetic oligonucleotide
cctgccaggaatgtgaccag

SEQ ID NO: 26 - DNA, 20 bp, Artificial sequence
  Synthetic oligonucleotide
catcctgccaggaatgtgac

SEQ ID NO: 27 - DNA, 20 bp, Artificial sequence
  Synthetic oligonucleotide
ttggcctggcatcctgccag

SEQ ID NO: 28 - DNA, 20 bp, Artificial sequence
  Synthetic oligonucleotide
tccaccttggcctggcatcc

SEQ ID NO: 29 - DNA, 20 bp, Artificial sequence
  Synthetic oligonucleotide
acccagtgccagttcccagc

SEQ ID NO: 30 - DNA, 20 bp, Artificial sequence
  Synthetic oligonucleotide
cccaaaagcgacccagtgcc

SEQ ID NO: 31 - DNA, 20 bp, Artificial sequence
  Synthetic oligonucleotide
aggtaatcccaaaagcgacc

SEQ ID NO: 32 - DNA, 20 bp, Artificial sequence
  Synthetic oligonucleotide
cgcaggtaatcccaaaagcg

SEQ ID NO: 33 - DNA, 20 bp, Artificial sequence
  Synthetic oligonucleotide
gcacccagcgcaggtaatcc

SEQ ID NO: 34 - DNA, 20 bp, Artificial sequence
  Synthetic oligonucleotide
tctgcacccagcgcaggtaa

SEQ ID NO: 35 - DNA, 20 bp, Artificial sequence
  Synthetic oligonucleotide
agtgtctgcacccagcgcag

SEQ ID NO: 36 - DNA, 20 bp, Artificial sequence
  Synthetic oligonucleotide
ctcagacagtgtctgcaccc

SEQ ID NO: 37 - DNA, 20 bp, Artificial sequence
  Synthetic oligonucleotide
gcacctgctcagacagtgtc

SEQ ID NO: 38 - DNA, 20 bp, Artificial sequence
  Synthetic oligonucleotide
gtgacctgggagctgagcag

SEQ ID NO: 39 - DNA, 20 bp, Artificial sequence
  Synthetic oligonucleotide
tcagttcctgggtgacctgg

SEQ ID NO: 40 - DNA, 20 bp, Artificial sequence
  Synthetic oligonucleotide
cgccctcagttcctgggtga

SEQ ID NO: 41 - DNA, 20 bp, Artificial sequence
  Synthetic oligonucleotide
cgatttgtaggccttcaact

SEQ ID NO: 42 - DNA, 20 bp, Artificial sequence
  Synthetic oligonucleotide
cagttccgatttgtaggcct

SEQ ID NO: 43 - DNA, 20 bp, Artificial sequence
  Synthetic oligonucleotide
tccttggacagccgtgcccg

SEQ ID NO: 44 - DNA, 20 bp, Artificial sequence
  Synthetic oligonucleotide
ctgcaccaggcggccgcaca

SEQ ID NO: 45 - DNA, 20 bp, Artificial sequence
  Synthetic oligonucleotide
gcggtactgcaccaggcggc

SEQ ID NO: 46 - DNA, 20 bp, Artificial sequence
  Synthetic oligonucleotide
gccgcggtactgcaccaggc

SEQ ID NO: 47 - DNA, 20 bp, Artificial sequence
  Synthetic oligonucleotide
ctggccgagcatggcctgca

SEQ ID NO: 48 - DNA, 20 bp, Artificial sequence
  Synthetic oligonucleotide
cgcagcttgcgcaggtggga

SEQ ID NO: 49 - DNA, 20 bp, Artificial sequence
  Synthetic oligonucleotide
gagccgcttacgcagcttgc

SEQ ID NO: 50 - DNA, 20 bp, Artificial sequence
  Synthetic oligonucleotide
ctgcaggtcatcggcatcgc

SEQ ID NO: 51 - DNA, 20 bp, Artificial sequence
  Synthetic oligonucleotide
cgcttctgcaggtcatcggc

SEQ ID NO: 52 - DNA, 20 bp, Artificial sequence
  Synthetic oligonucleotide
ccggcctggtacactgccag

SEQ ID NO: 53 - DNA, 20 bp, Artificial sequence
  Synthetic oligonucleotide
gccccggcctggtacactgc

SEQ ID NO: 54 - DNA, 20 bp, Artificial sequence
  Synthetic oligonucleotide
gcgggccccggcctggtaca

SEQ ID NO: 55 - DNA, 20 bp, Artificial sequence
  Synthetic oligonucleotide
gcccacagtggcggcccgca

SEQ ID NO: 56 - DNA, 20 bp, Artificial sequence
  Synthetic oligonucleotide
ggagcccacagtggcggccc

SEQ ID NO: 57 - DNA, 20 bp, Artificial sequence
  Synthetic oligonucleotide
cagggagcccacagtggcgg

SEQ ID NO: 58 - DNA, 20 bp, Artificial sequence
  Synthetic oligonucleotide
ggccagggagcccacagtgg

SEQ ID NO: 59 - DNA, 20 bp, Artificial sequence
  Synthetic oligonucleotide
ctggccggccagggagccca

SEQ ID NO: 60 - DNA, 20 bp, Artificial sequence
  Synthetic oligonucleotide
gcgggtccggctgcccatct

SEQ ID NO: 61 - DNA, 20 bp, Artificial sequence
  Synthetic oligonucleotide
tccagcttggcgcgcacctc

SEQ ID NO: 62 - DNA, 20 bp, Artificial sequence
  Synthetic oligonucleotide
ggaaggcctcggcctgcagg

SEQ ID NO: 63 - DNA, 20 bp, Artificial sequence
  Synthetic oligonucleotide
tcttgaggcgggcctggaag

SEQ ID NO: 64 - DNA, 20 bp, Artificial sequence
  Synthetic oligonucleotide
cgaaccagctcttgaggcgg

SEQ ID NO: 65 - DNA, 20 bp, Artificial sequence
  Synthetic oligonucleotide
ctgcatgtcttccaccaggg

SEQ ID NO: 66 - DNA, 20 bp, Artificial sequence
  Synthetic oligonucleotide
gcgctgcatgtcttccacca

SEQ ID NO: 67 - DNA, 20 bp, Artificial sequence
  Synthetic oligonucleotide
gtgcccacggcagcctgcac

SEQ ID NO: 68 - DNA, 20 bp, Artificial sequence
  Synthetic oligonucleotide
cagtgattgtcgctgggcac

SEQ ID NO: 69 - DNA, 20 bp, Artificial sequence
  Synthetic oligonucleotide
cgttcagtgattgtcgctgg

SEQ ID NO: 70 - DNA, 20 bp, Artificial sequence
  Synthetic oligonucleotide
cgcatggctgcaggcttcgg

SEQ ID NO: 71 - DNA, 20 bp, Artificial sequence
  Synthetic oligonucleotide
ggtcgcatggctgcaggctt

SEQ ID NO: 72 - DNA, 20 bp, Artificial sequence
  Synthetic oligonucleotide
accccaggaggacggctggg

SEQ ID NO: 73 - DNA, 20 bp, Artificial sequence
  Synthetic oligonucleotide
gtccaccccaggaggacggc

SEQ ID NO: 74 - DNA, 20 bp, Artificial sequence
  Synthetic oligonucleotide
agggtccaccccaggaggac

SEQ ID NO: 75 - DNA, 20 bp, Artificial sequence
  Synthetic oligonucleotide
aactagggtccaccccagga

SEQ ID NO: 76 - DNA, 20 bp, Artificial sequence
  Synthetic oligonucleotide
ttattaaactagggtccacc

SEQ ID NO: 77 - DNA, 20 bp, Artificial sequence
  Synthetic oligonucleotide
gtgaaacttggtgaatcttt

SEQ ID NO: 78 - DNA, 20 bp, Artificial sequence
  Synthetic oligonucleotide
cccagggtcccagctctttc

SEQ ID NO: 79 - DNA, 20 bp, Artificial sequence
  Synthetic oligonucleotide
ggttcccagggtcccagctc

SEQ ID NO: 80 - DNA, 20 bp, Artificial sequence
  Synthetic oligonucleotide
gagactacctggaggccagg

SEQ ID NO: 81 - DNA, 20 bp, Artificial sequence
  Synthetic oligonucleotide
accgtgtcgctgcccctggc

SEQ ID NO: 82 - DNA, 20 bp, Artificial sequence
  Synthetic oligonucleotide
ccccatacctgccaggaatg

SEQ ID NO: 83 - DNA, 20 bp, Artificial sequence
  Synthetic oligonucleotide
tgtgtgccccaggcagggct

SEQ ID NO: 84 - DNA, 20 bp, Artificial sequence
  Synthetic oligonucleotide
tcacctcagttcctgggtga

SEQ ID NO: 85 - DNA, 20 bp, Artificial sequence
  Synthetic oligonucleotide
gccgcccaccaggagggtca

SEQ ID NO: 86 - DNA, 20 bp, Artificial sequence
  Synthetic oligonucleotide
gcaggccgggctcggagccc

SEQ ID NO: 87 - DNA, 20 bp, Artificial sequence
  Synthetic oligonucleotide
tgtgattggccagtcggctc

SEQ ID NO: 88 - DNA, 20 bp, Artificial sequence
  Synthetic oligonucleotide
tggctggcatcctgccagga

SEQ ID NO: 89 - DNA, 20 bp, Artificial sequence
  Synthetic oligonucleotide
tacgcagttgcgcaggtggg

SEQ ID NO: 90 - DNA, 20 bp, Artificial sequence
  Synthetic oligonucleotide
aggagccgttacgcagttgc

SEQ ID NO: 91 - DNA, 20 bp, Artificial sequence
  Synthetic oligonucleotide
attaaacttagggtccactc

SEQ ID NO: 92 - DNA, 20 bp, Artificial sequence
  Synthetic oligonucleotide
tttattaaacttagggtcca

SEQ ID NO: 93 - DNA, 20 bp, Artificial sequence
  Synthetic oligonucleotide
tgttccaccagggccccagg

SEQ ID NO: 94 - DNA, 20 bp, Artificial sequence
  Synthetic oligonucleotide
ggagcccacagtgccggccg

SEQ ID NO: 95 - DNA, 20 bp, Artificial sequence
  Synthetic oligonucleotide
cacttctgcaggtcatcggc

SEQ ID NO: 96 - DNA, 20 bp, Artificial sequence
  Synthetic oligonucleotide
ccaggcacttctgcaggtca

SEQ ID NO: 97 - DNA, 18 bp, Artificial sequence
  Synthetic oligonucleotide
agtaggactcaaggatcc

SEQ ID NO: 98 - DNA, 18 bp, Artificial sequence
  Synthetic oligonucleotide
tgagtaggactcaaggat

SEQ ID NO: 99 - DNA, 18 bp, Artificial sequence
  Synthetic oligonucleotide
gctgagtaggactcaagg

SEQ ID NO: 100 - DNA, 18 bp, Artificial sequence
  Synthetic oligonucleotide
gggctgagtaggactcaa

SEQ ID NO: 101 - DNA, 18 bp, Artificial sequence
  Synthetic oligonucleotide
tccttcacctccgctggg

SEQ ID NO: 102 - DNA, 18 bp, Artificial sequence
  Synthetic oligonucleotide
cgtccttcacctccgctg

SEQ ID NO: 103 - DNA, 18 bp, Artificial sequence
  Synthetic oligonucleotide
gcctgtgattggccagtc

SEQ ID NO: 104 - DNA, 18 bp, Artificial sequence
  Synthetic oligonucleotide
ctgcctgtgattggccag

SEQ ID NO: 105 - DNA, 18 bp, Artificial sequence
  Synthetic oligonucleotide
tcctgcctgtgattggcc

SEQ ID NO: 106 - DNA, 18 bp, Artificial sequence
  Synthetic oligonucleotide
cttcctgcctgtgattgg

SEQ ID NO: 107 - DNA, 18 bp, Artificial sequence
  Synthetic oligonucleotide
atcttcctgcctgtgatt

SEQ ID NO: 108 - DNA, 18 bp, Artificial sequence
  Synthetic oligonucleotide
cttcatcttcctgcctgt

SEQ ID NO: 109 - DNA, 18 bp, Artificial sequence
  Synthetic oligonucleotide
accttcatcttcctgcct

SEQ ID NO: 110 - DNA, 18 bp, Artificial sequence
  Synthetic oligonucleotide
gaaccttcatcttcctgc

SEQ ID NO: 111 - DNA, 18 bp, Artificial sequence
  Synthetic oligonucleotide
cagaaccttcatcttcct

SEQ ID NO: 112 - DNA, 18 bp, Artificial sequence
  Synthetic oligonucleotide
cacagaaccttcatcttc

SEQ ID NO: 113 - DNA, 18 bp, Artificial sequence
  Synthetic oligonucleotide
cccacagaaccttcatct

SEQ ID NO: 114 - DNA, 18 bp, Artificial sequence
  Synthetic oligonucleotide
agcccacagaaccttcat

SEQ ID NO: 115 - DNA, 18 bp, Artificial sequence
  Synthetic oligonucleotide
gcagcccacagaaccttc

SEQ ID NO: 116 - DNA, 18 bp, Artificial sequence
  Synthetic oligonucleotide
acgcagcccacagaacct

SEQ ID NO: 117 - DNA, 18 bp, Artificial sequence
  Synthetic oligonucleotide
caacgcagcccacagaac

SEQ ID NO: 118 - DNA, 18 bp, Artificial sequence
  Synthetic oligonucleotide
agcaacgcagcccacaga

SEQ ID NO: 119 - DNA, 18 bp, Artificial sequence
  Synthetic oligonucleotide
ccagcaacgcagcccaca

SEQ ID NO: 120 - DNA, 18 bp, Artificial sequence
  Synthetic oligonucleotide
gaccagcaacgcagccca

SEQ ID NO: 121 - DNA, 18 bp, Artificial sequence
  Synthetic oligonucleotide
gtgaccagcaacgcagcc

SEQ ID NO: 122 - DNA, 18 bp, Artificial sequence
  Synthetic oligonucleotide
atgtgaccagcaacgcag

SEQ ID NO: 123 - DNA, 18 bp, Artificial sequence
  Synthetic oligonucleotide
aggaatgtgaccagcaac

SEQ ID NO: 124 - DNA, 18 bp, Artificial sequence
  Synthetic oligonucleotide
ccaggaatgtgaccagca

SEQ ID NO: 125 - DNA, 18 bp, Artificial sequence
  Synthetic oligonucleotide
tgccaggaatgtgaccag

SEQ ID NO: 126 - DNA, 18 bp, Artificial sequence
  Synthetic oligonucleotide
cctgccaggaatgtgacc

SEQ ID NO: 127 - DNA, 18 bp, Artificial sequence
  Synthetic oligonucleotide
atcctgccaggaatgtga

SEQ ID NO: 128 - DNA, 18 bp, Artificial sequence
  Synthetic oligonucleotide
gcatcctgccaggaatgt

SEQ ID NO: 129 - DNA, 18 bp, Artificial sequence
  Synthetic oligonucleotide
tggcatcctgccaggaat

SEQ ID NO: 130 - DNA, 18 bp, Artificial sequence
  Synthetic oligonucleotide
cctggcatcctgccagga

SEQ ID NO: 131 - DNA, 18 bp, Artificial sequence
  Synthetic oligonucleotide
ggcctggcatcctgccag

SEQ ID NO: 132 - DNA, 18 bp, Artificial sequence
  Synthetic oligonucleotide
ccttggcctggcatcctg

SEQ ID NO: 133 - DNA, 18 bp, Artificial sequence
  Synthetic oligonucleotide
caccttggcctggcatcc

SEQ ID NO: 134 - DNA, 18 bp, Artificial sequence
  Synthetic oligonucleotide
tccaccttggcctggcat

SEQ ID NO: 135 - DNA, 18 bp, Artificial sequence
  Synthetic oligonucleotide
gctccaccttggcctggc

SEQ ID NO: 136 - DNA, 18 bp, Artificial sequence
  Synthetic oligonucleotide
ttgctccaccttggcctg

SEQ ID NO: 137 - DNA, 18 bp, Artificial sequence
  Synthetic oligonucleotide
gcttgctccaccttggcc

SEQ ID NO: 138 - DNA, 18 bp, Artificial sequence
  Synthetic oligonucleotide
ccgcttgctccaccttgg

SEQ ID NO: 139 - DNA, 18 bp, Artificial sequence
  Synthetic oligonucleotide
tccaccgcttgctccacc

SEQ ID NO: 140 - DNA, 18 bp, Artificial sequence
  Synthetic oligonucleotide
tctccaccgcttgctcca

SEQ ID NO: 141 - DNA, 18 bp, Artificial sequence
  Synthetic oligonucleotide
tgtctccaccgcttgctc

SEQ ID NO: 142 - DNA, 18 bp, Artificial sequence
  Synthetic oligonucleotide
tctgtctccaccgcttgc

SEQ ID NO: 143 - DNA, 18 bp, Artificial sequence
  Synthetic oligonucleotide
gctctgtctccaccgctt

SEQ ID NO: 144 - DNA, 18 bp, Artificial sequence
  Synthetic oligonucleotide
cggctctgtctccaccgc

SEQ ID NO: 145 - DNA, 18 bp, Artificial sequence
  Synthetic oligonucleotide
tccggctctgtctccacc

SEQ ID NO: 146 - DNA, 18 bp, Artificial sequence
  Synthetic oligonucleotide
gctccggctctgtctcca

SEQ ID NO: 147 - DNA, 18 bp, Artificial sequence
  Synthetic oligonucleotide
tcgggctccggctctgtc

SEQ ID NO: 148 - DNA, 18 bp, Artificial sequence
  Synthetic oligonucleotide
agctcgggctccggctct

SEQ ID NO: 149 - DNA, 18 bp, Artificial sequence
  Synthetic oligonucleotide
gcagctcgggctccggct

SEQ ID NO: 150 - DNA, 18 bp, Artificial sequence
  Synthetic oligonucleotide
gcgcagctcgggctccgg

SEQ ID NO: 151 - DNA, 18 bp, Artificial sequence
  Synthetic oligonucleotide
tggcgcagctcgggctcc

SEQ ID NO: 152 - DNA, 18 bp, Artificial sequence
  Synthetic oligonucleotide
gctggcgcagctcgggct

SEQ ID NO: 153 - DNA, 18 bp, Artificial sequence
  Synthetic oligonucleotide
ctgctggcgcagctcggg

SEQ ID NO: 154 - DNA, 18 bp, Artificial sequence
  Synthetic oligonucleotide
gtctgctggcgcagctcg

SEQ ID NO: 155 - DNA, 18 bp, Artificial sequence
  Synthetic oligonucleotide
cggtctgctggcgcagct

SEQ ID NO: 156 - DNA, 18 bp, Artificial sequence
  Synthetic oligonucleotide
ctcggtctgctggcgcag

SEQ ID NO: 157 - DNA, 18 bp, Artificial sequence
  Synthetic oligonucleotide
cactcggtctgctggcgc

SEQ ID NO: 158 - DNA, 18 bp, Artificial sequence
  Synthetic oligonucleotide
gccactcggtctgctggc

SEQ ID NO: 159 - DNA, 18 bp, Artificial sequence
  Synthetic oligonucleotide
ctgccactcggtctgctg

SEQ ID NO: 160 - DNA, 18 bp, Artificial sequence
  Synthetic oligonucleotide
ctctgccactcggtctgc

SEQ ID NO: 161 - DNA, 18 bp, Artificial sequence
  Synthetic oligonucleotide
cgctctgccactcggtct

SEQ ID NO: 162 - DNA, 18 bp, Artificial sequence
  Synthetic oligonucleotide
gccgctctgccactcggt

SEQ ID NO: 163 - DNA, 18 bp, Artificial sequence
  Synthetic oligonucleotide
tggccgctctgccactcg

SEQ ID NO: 164 - DNA, 18 bp, Artificial sequence
  Synthetic oligonucleotide
gctggccgctctgccact

SEQ ID NO: 165 - DNA, 18 bp, Artificial sequence
  Synthetic oligonucleotide
gcgctggccgctctgcca

SEQ ID NO: 166 - DNA, 18 bp, Artificial sequence
  Synthetic oligonucleotide
agtgccagttcccagcgc

SEQ ID NO: 167 - DNA, 18 bp, Artificial sequence
  Synthetic oligonucleotide
ccagtgccagttcccagc

SEQ ID NO: 168 - DNA, 18 bp, Artificial sequence
  Synthetic oligonucleotide
cgacccagtgccagttcc

SEQ ID NO: 169 - DNA, 18 bp, Artificial sequence
  Synthetic oligonucleotide
gcatggctgcaggcttcg

SEQ ID NO: 170 - DNA, 18 bp, Artificial sequence
  Synthetic oligonucleotide
gtcgcatggctgcaggct

SEQ ID NO: 171 - DNA, 18 bp, Artificial sequence
  Synthetic oligonucleotide
agcgacccagtgccagtt

SEQ ID NO: 172 - DNA, 18 bp, Artificial sequence
  Synthetic oligonucleotide
aaagcgacccagtgccag

SEQ ID NO: 173 - DNA, 18 bp, Artificial sequence
  Synthetic oligonucleotide
caaaagcgacccagtgcc

SEQ ID NO: 174 - DNA, 18 bp, Artificial sequence
  Synthetic oligonucleotide
cccaaaagcgacccagtg

SEQ ID NO: 175 - DNA, 18 bp, Artificial sequence
  Synthetic oligonucleotide
atcccaaaagcgacccag

SEQ ID NO: 176 - DNA, 18 bp, Artificial sequence
  Synthetic oligonucleotide
taatcccaaaagcgaccc

SEQ ID NO: 177 - DNA, 18 bp, Artificial sequence
  Synthetic oligonucleotide
ggtaatcccaaaagcgac

SEQ ID NO: 178 - DNA, 18 bp, Artificial sequence
  Synthetic oligonucleotide
cgcaggtaatcccaaaag

SEQ ID NO: 179 - DNA, 18 bp, Artificial sequence
  Synthetic oligonucleotide
agcgcaggtaatcccaaa

SEQ ID NO: 180 - DNA, 18 bp, Artificial sequence
  Synthetic oligonucleotide
ccagcgcaggtaatccca

SEQ ID NO: 181 - DNA, 18 bp, Artificial sequence
  Synthetic oligonucleotide
acccagcgcaggtaatcc

SEQ ID NO: 182 - DNA, 18 bp, Artificial sequence
  Synthetic oligonucleotide
gcacccagcgcaggtaat

SEQ ID NO: 183 - DNA, 18 bp, Artificial sequence
  Synthetic oligonucleotide
ctgcacccagcgcaggta

SEQ ID NO: 184 - DNA, 18 bp, Artificial sequence
  Synthetic oligonucleotide
gtctgcacccagcgcagg

SEQ ID NO: 185 - DNA, 18 bp, Artificial sequence
  Synthetic oligonucleotide
agtgtctgcacccagcgc

SEQ ID NO: 186 - DNA, 18 bp, Artificial sequence
  Synthetic oligonucleotide
cagtgtctgcacccagcg

SEQ ID NO: 187 - DNA, 18 bp, Artificial sequence
  Synthetic oligonucleotide
gacagtgtctgcacccag

SEQ ID NO: 188 - DNA, 18 bp, Artificial sequence
  Synthetic oligonucleotide
cagacagtgtctgcaccc

SEQ ID NO: 189 - DNA, 18 bp, Artificial sequence
  Synthetic oligonucleotide
ctcagacagtgtctgcac

SEQ ID NO: 190 - DNA, 18 bp, Artificial sequence
  Synthetic oligonucleotide
tgctcagacagtgtctgc

SEQ ID NO: 191 - DNA, 18 bp, Artificial sequence
  Synthetic oligonucleotide
cacctgctcagacagtgt

SEQ ID NO: 192 - DNA, 18 bp, Artificial sequence
  Synthetic oligonucleotide
tgcacctgctcagacagt

SEQ ID NO: 193 - DNA, 18 bp, Artificial sequence
  Synthetic oligonucleotide
cctgcacctgctcagaca

SEQ ID NO: 194 - DNA, 18 bp, Artificial sequence
  Synthetic oligonucleotide
ctcctgcacctgctcaga

SEQ ID NO: 195 - DNA, 18 bp, Artificial sequence
  Synthetic oligonucleotide
tcctcctgcacctgctca

SEQ ID NO: 196 - DNA, 18 bp, Artificial sequence
  Synthetic oligonucleotide
gctcctcctgcacctgct

SEQ ID NO: 197 - DNA, 18 bp, Artificial sequence
  Synthetic oligonucleotide
cagctcctcctgcacctg

SEQ ID NO: 198 - DNA, 18 bp, Artificial sequence
  Synthetic oligonucleotide
agcagctcctcctgcacc

SEQ ID NO: 199 - DNA, 18 bp, Artificial sequence
  Synthetic oligonucleotide
gctgagcagctcctcctg

SEQ ID NO: 200 - DNA, 18 bp, Artificial sequence
  Synthetic oligonucleotide
gagctgagcagctcctcc

SEQ ID NO: 201 - DNA, 18 bp, Artificial sequence
  Synthetic oligonucleotide
gggagctgagcagctcct

SEQ ID NO: 202 - DNA, 18 bp, Artificial sequence
  Synthetic oligonucleotide
ctgggagctgagcagctc

SEQ ID NO: 203 - DNA, 18 bp, Artificial sequence
  Synthetic oligonucleotide
tgacctgggagctgagca

SEQ ID NO: 204 - DNA, 18 bp, Artificial sequence
  Synthetic oligonucleotide
ggtgacctgggagctgag

SEQ ID NO: 205 - DNA, 18 bp, Artificial sequence
  Synthetic oligonucleotide
agttcctgggtgacctgg

SEQ ID NO: 206 - DNA, 18 bp, Artificial sequence
  Synthetic oligonucleotide
tcagttcctgggtgacct

SEQ ID NO: 207 - DNA, 18 bp, Artificial sequence
  Synthetic oligonucleotide
cctcagttcctgggtgac

SEQ ID NO: 208 - DNA, 18 bp, Artificial sequence
  Synthetic oligonucleotide
gccctcagttcctgggtg

SEQ ID NO: 209 - DNA, 18 bp, Artificial sequence
  Synthetic oligonucleotide
gcgccctcagttcctggg

SEQ ID NO: 210 - DNA, 18 bp, Artificial sequence
  Synthetic oligonucleotide
aactccttcatggtctcg

SEQ ID NO: 211 - DNA, 18 bp, Artificial sequence
  Synthetic oligonucleotide
cttcaactccttcatggt

SEQ ID NO: 212 - DNA, 18 bp, Artificial sequence
  Synthetic oligonucleotide
gccttcaactccttcatg

SEQ ID NO: 213 - DNA, 18 bp, Artificial sequence
  Synthetic oligonucleotide
aggccttcaactccttca

SEQ ID NO: 214 - DNA, 18 bp, Artificial sequence
  Synthetic oligonucleotide
gtaggccttcaactcctt

SEQ ID NO: 215 - DNA, 18 bp, Artificial sequence
  Synthetic oligonucleotide
atttgtaggccttcaact

SEQ ID NO: 216 - DNA, 18 bp, Artificial sequence
  Synthetic oligonucleotide
cgatttgtaggccttcaa

SEQ ID NO: 217 - DNA, 18 bp, Artificial sequence
  Synthetic oligonucleotide
tccgatttgtaggccttc

SEQ ID NO: 218 - DNA, 18 bp, Artificial sequence
  Synthetic oligonucleotide
gttccgatttgtaggcct

SEQ ID NO: 219 - DNA, 18 bp, Artificial sequence
  Synthetic oligonucleotide
cagttccgatttgtaggc

SEQ ID NO: 220 - DNA, 18 bp, Artificial sequence
  Synthetic oligonucleotide
tccagttccgatttgtag

SEQ ID NO: 221 - DNA, 18 bp, Artificial sequence
  Synthetic oligonucleotide
cctccagttccgatttgt

SEQ ID NO: 222 - DNA, 18 bp, Artificial sequence
  Synthetic oligonucleotide
ttcctccagttccgattt

SEQ ID NO: 223 - DNA, 18 bp, Artificial sequence
  Synthetic oligonucleotide
tgttcctccagttccgat

SEQ ID NO: 224 - DNA, 18 bp, Artificial sequence
  Synthetic oligonucleotide
gttgttcctccagttccg

SEQ ID NO: 225 - DNA, 18 bp, Artificial sequence
  Synthetic oligonucleotide
cagttgttcctccagttc

SEQ ID NO: 226 - DNA, 18 bp, Artificial sequence
  Synthetic oligonucleotide
gtcagttgttcctccagt

SEQ ID NO: 227 - DNA, 18 bp, Artificial sequence
  Synthetic oligonucleotide
gggtcagttgttcctcca

SEQ ID NO: 228 - DNA, 18 bp, Artificial sequence
  Synthetic oligonucleotide
gtctcctccgccaccggg

SEQ ID NO: 229 - DNA, 18 bp, Artificial sequence
  Synthetic oligonucleotide
tggacagccgtgcccgcg

SEQ ID NO: 230 - DNA, 18 bp, Artificial sequence
  Synthetic oligonucleotide
cttggacagccgtgcccg

SEQ ID NO: 231 - DNA, 18 bp, Artificial sequence
  Synthetic oligonucleotide
tccttggacagccgtgcc

SEQ ID NO: 232 - DNA, 18 bp, Artificial sequence
  Synthetic oligonucleotide
gctccttggacagccgtg

SEQ ID NO: 233 - DNA, 18 bp, Artificial sequence
  Synthetic oligonucleotide
cagctccttggacagccg

SEQ ID NO: 234 - DNA, 18 bp, Artificial sequence
  Synthetic oligonucleotide
tgcagctccttggacagc

SEQ ID NO: 235 - DNA, 18 bp, Artificial sequence
  Synthetic oligonucleotide
cctgcagctccttggaca

SEQ ID NO: 236 - DNA, 18 bp, Artificial sequence
  Synthetic oligonucleotide
gccgcctgcagctccttg

SEQ ID NO: 237 - DNA, 18 bp, Artificial sequence
  Synthetic oligonucleotide
gcgccgcctgcagctcct

SEQ ID NO: 238 - DNA, 18 bp, Artificial sequence
  Synthetic oligonucleotide
ctgcgccgcctgcagctc

SEQ ID NO: 239 - DNA, 18 bp, Artificial sequence
  Synthetic oligonucleotide
gcctgcgccgcctgcagc

SEQ ID NO: 240 - DNA, 18 bp, Artificial sequence
  Synthetic oligonucleotide
gggcctgcgccgcctgca

SEQ ID NO: 241 - DNA, 18 bp, Artificial sequence
  Synthetic oligonucleotide
ccgggcctgcgccgcctg

SEQ ID NO: 242 - DNA, 18 bp, Artificial sequence
  Synthetic oligonucleotide
agccgggcctgcgccgcc

SEQ ID NO: 243 - DNA, 18 bp, Artificial sequence
  Synthetic oligonucleotide
gcccagccgggcctgcgc

SEQ ID NO: 244 - DNA, 18 bp, Artificial sequence
  Synthetic oligonucleotide
gcgcccagccgggcctgc

SEQ ID NO: 245 - DNA, 18 bp, Artificial sequence
  Synthetic oligonucleotide
ccgcgcccagccgggcct

SEQ ID NO: 246 - DNA, 18 bp, Artificial sequence
  Synthetic oligonucleotide
gtccgcgcccagccgggc

SEQ ID NO: 247 - DNA, 18 bp, Artificial sequence
  Synthetic oligonucleotide
atgtccgcgcccagccgg

SEQ ID NO: 248 - DNA, 18 bp, Artificial sequence
  Synthetic oligonucleotide
ccatgtccgcgcccagcc

SEQ ID NO: 249 - DNA, 18 bp, Artificial sequence
  Synthetic oligonucleotide
ctccatgtccgcgcccag

SEQ ID NO: 250 - DNA, 18 bp, Artificial sequence
  Synthetic oligonucleotide
tcctccatgtccgcgccc

SEQ ID NO: 251 - DNA, 18 bp, Artificial sequence
  Synthetic oligonucleotide
cgtcctccatgtccgcgc

SEQ ID NO: 252 - DNA, 18 bp, Artificial sequence
  Synthetic oligonucleotide
accaggcggccgcacacg

SEQ ID NO: 253 - DNA, 18 bp, Artificial sequence
  Synthetic oligonucleotide
gcaccaggcggccgcaca

SEQ ID NO: 254 - DNA, 18 bp, Artificial sequence
  Synthetic oligonucleotide
ctgcaccaggcggccgca

SEQ ID NO: 255 - DNA, 18 bp, Artificial sequence
  Synthetic oligonucleotide
tactgcaccaggcggccg

SEQ ID NO: 256 - DNA, 18 bp, Artificial sequence
  Synthetic oligonucleotide
ggtactgcaccaggcggc

SEQ ID NO: 257 - DNA, 18 bp, Artificial sequence
  Synthetic oligonucleotide
gcggtactgcaccaggcg

SEQ ID NO: 258 - DNA, 18 bp, Artificial sequence
  Synthetic oligonucleotide
ccgcggtactgcaccagg

SEQ ID NO: 259 - DNA, 18 bp, Artificial sequence
  Synthetic oligonucleotide
cgccgcggtactgcacca

SEQ ID NO: 260 - DNA, 18 bp, Artificial sequence
  Synthetic oligonucleotide
acctcgccgcggtactgc

SEQ ID NO: 261 - DNA, 18 bp, Artificial sequence
  Synthetic oligonucleotide
gcacctcgccgcggtact

SEQ ID NO: 262 - DNA, 18 bp, Artificial sequence
  Synthetic oligonucleotide
gcctgcacctcgccgcgg

SEQ ID NO: 263 - DNA, 18 bp, Artificial sequence
  Synthetic oligonucleotide
tggcctgcacctcgccgc

SEQ ID NO: 264 - DNA, 18 bp, Artificial sequence
  Synthetic oligonucleotide
catggcctgcacctcgcc

SEQ ID NO: 265 - DNA, 18 bp, Artificial sequence
  Synthetic oligonucleotide
agcatggcctgcacctcg

SEQ ID NO: 266 - DNA, 18 bp, Artificial sequence
  Synthetic oligonucleotide
cgagcatggcctgcacct

SEQ ID NO: 267 - DNA, 18 bp, Artificial sequence
  Synthetic oligonucleotide
gccgagcatggcctgcac

SEQ ID NO: 268 - DNA, 18 bp, Artificial sequence
  Synthetic oligonucleotide
tggccgagcatggcctgc

SEQ ID NO: 269 - DNA, 18 bp, Artificial sequence
  Synthetic oligonucleotide
gctctggccgagcatggc

SEQ ID NO: 270 - DNA, 18 bp, Artificial sequence
  Synthetic oligonucleotide
gtgctctggccgagcatg

SEQ ID NO: 271 - DNA, 18 bp, Artificial sequence
  Synthetic oligonucleotide
cggtgctctggccgagca

SEQ ID NO: 272 - DNA, 18 bp, Artificial sequence
  Synthetic oligonucleotide
ctcggtgctctggccgag

SEQ ID NO: 273 - DNA, 18 bp, Artificial sequence
  Synthetic oligonucleotide
tcctcggtgctctggccg

SEQ ID NO: 274 - DNA, 18 bp, Artificial sequence
  Synthetic oligonucleotide
gctcctcggtgctctggc

SEQ ID NO: 275 - DNA, 18 bp, Artificial sequence
  Synthetic oligonucleotide
cagctcctcggtgctctg

SEQ ID NO: 276 - DNA, 18 bp, Artificial sequence
  Synthetic oligonucleotide
cgcagctcctcggtgctc

SEQ ID NO: 277 - DNA, 18 bp, Artificial sequence
  Synthetic oligonucleotide
cccgcagctcctcggtgc

SEQ ID NO: 278 - DNA, 18 bp, Artificial sequence
  Synthetic oligonucleotide
cacccgcagctcctcggt

SEQ ID NO: 279 - DNA, 18 bp, Artificial sequence
  Synthetic oligonucleotide
cgcacccgcagctcctcg

SEQ ID NO: 280 - DNA, 18 bp, Artificial sequence
  Synthetic oligonucleotide
ggcgcacccgcagctcct

SEQ ID NO: 281 - DNA, 18 bp, Artificial sequence
  Synthetic oligonucleotide
gaggcgcacccgcagctc

SEQ ID NO: 282 - DNA, 18 bp, Artificial sequence
  Synthetic oligonucleotide
gcgaggcgcacccgcagc

SEQ ID NO: 283 - DNA, 18 bp, Artificial sequence
  Synthetic oligonucleotide
aggcgaggcgcacccgca

SEQ ID NO: 284 - DNA, 18 bp, Artificial sequence
  Synthetic oligonucleotide
ggaggcgaggcgcacccg

SEQ ID NO: 285 - DNA, 18 bp, Artificial sequence
  Synthetic oligonucleotide
tgggaggcgaggcgcacc

SEQ ID NO: 286 - DNA, 18 bp, Artificial sequence
  Synthetic oligonucleotide
ggtgggaggcgaggcgca

SEQ ID NO: 287 - DNA, 18 bp, Artificial sequence
  Synthetic oligonucleotide
caggtgggaggcgaggcg

SEQ ID NO: 288 - DNA, 18 bp, Artificial sequence
  Synthetic oligonucleotide
cgcaggtgggaggcgagg

SEQ ID NO: 289 - DNA, 18 bp, Artificial sequence
  Synthetic oligonucleotide
cttgcgcaggtgggaggc

SEQ ID NO: 290 - DNA, 18 bp, Artificial sequence
  Synthetic oligonucleotide
agcttgcgcaggtgggag

SEQ ID NO: 291 - DNA, 18 bp, Artificial sequence
  Synthetic oligonucleotide
acgcagcttgcgcaggtg

SEQ ID NO: 292 - DNA, 18 bp, Artificial sequence
  Synthetic oligonucleotide
ttacgcagcttgcgcagg

SEQ ID NO: 293 - DNA, 18 bp, Artificial sequence
  Synthetic oligonucleotide
gcttacgcagcttgcgca

SEQ ID NO: 294 - DNA, 18 bp, Artificial sequence
  Synthetic oligonucleotide
ccgcttacgcagcttgcg

SEQ ID NO: 295 - DNA, 18 bp, Artificial sequence
  Synthetic oligonucleotide
agccgcttacgcagcttg

SEQ ID NO: 296 - DNA, 18 bp, Artificial sequence
  Synthetic oligonucleotide
ggagccgcttacgcagct

SEQ ID NO: 297 - DNA, 18 bp, Artificial sequence
  Synthetic oligonucleotide
cggaggagccgcttacgc

SEQ ID NO: 298 - DNA, 18 bp, Artificial sequence
  Synthetic oligonucleotide
cgcggaggagccgcttac

SEQ ID NO: 299 - DNA, 18 bp, Artificial sequence
  Synthetic oligonucleotide
atcgcggaggagccgctt

SEQ ID NO: 300 - DNA, 18 bp, Artificial sequence
  Synthetic oligonucleotide
gcatcgcggaggagccgc

SEQ ID NO: 301 - DNA, 18 bp, Artificial sequence
  Synthetic oligonucleotide
cggcatcgcggaggagcc

SEQ ID NO: 302 - DNA, 18 bp, Artificial sequence
  Synthetic oligonucleotide
atcggcatcgcggaggag

SEQ ID NO: 303 - DNA, 18 bp, Artificial sequence
  Synthetic oligonucleotide
ggtcatcggcatcgcgga

SEQ ID NO: 304 - DNA, 18 bp, Artificial sequence
  Synthetic oligonucleotide
caggtcatcggcatcgcg

SEQ ID NO: 305 - DNA, 18 bp, Artificial sequence
  Synthetic oligonucleotide
ctgcaggtcatcggcatc

SEQ ID NO: 306 - DNA, 18 bp, Artificial sequence
  Synthetic oligonucleotide
tctgcaggtcatcggcat

SEQ ID NO: 307 - DNA, 18 bp, Artificial sequence
  Synthetic oligonucleotide
cttctgcaggtcatcggc

SEQ ID NO: 308 - DNA, 18 bp, Artificial sequence
  Synthetic oligonucleotide
cgcttctgcaggtcatcg

SEQ ID NO: 309 - DNA, 18 bp, Artificial sequence
  Synthetic oligonucleotide
tggtacactgccaggcgc

SEQ ID NO: 310 - DNA, 18 bp, Artificial sequence
  Synthetic oligonucleotide
cctggtacactgccaggc

SEQ ID NO: 311 - DNA, 18 bp, Artificial sequence
  Synthetic oligonucleotide
ggcctggtacactgccag

SEQ ID NO: 312 - DNA, 18 bp, Artificial sequence
  Synthetic oligonucleotide
ccggcctggtacactgcc

SEQ ID NO: 313 - DNA, 18 bp, Artificial sequence
  Synthetic oligonucleotide
ccccggcctggtacactg

SEQ ID NO: 314 - DNA, 18 bp, Artificial sequence
  Synthetic oligonucleotide
ggccccggcctggtacac

SEQ ID NO: 315 - DNA, 18 bp, Artificial sequence
  Synthetic oligonucleotide
cgggccccggcctggtac

SEQ ID NO: 316 - DNA, 18 bp, Artificial sequence
  Synthetic oligonucleotide
cgcgggccccggcctggt

SEQ ID NO: 317 - DNA, 18 bp, Artificial sequence
  Synthetic oligonucleotide
ctcgcgggccccggcctg

SEQ ID NO: 318 - DNA, 18 bp, Artificial sequence
  Synthetic oligonucleotide
ccctcgcgggccccggcc

SEQ ID NO: 319 - DNA, 18 bp, Artificial sequence
  Synthetic oligonucleotide
cgccctcgcgggccccgg

SEQ ID NO: 320 - DNA, 18 bp, Artificial sequence
  Synthetic oligonucleotide
tgaggccgcgctcggcgc

SEQ ID NO: 321 - DNA, 18 bp, Artificial sequence
  Synthetic oligonucleotide
gctgaggccgcgctcggc

SEQ ID NO: 322 - DNA, 18 bp, Artificial sequence
  Synthetic oligonucleotide
gcgctgaggccgcgctcg

SEQ ID NO: 323 - DNA, 18 bp, Artificial sequence
  Synthetic oligonucleotide
ggccctgttccaccaggg

SEQ ID NO: 324 - DNA, 18 bp, Artificial sequence
  Synthetic oligonucleotide
gcggccctgttccaccag

SEQ ID NO: 325 - DNA, 18 bp, Artificial sequence
  Synthetic oligonucleotide
acgcggccctgttccacc

SEQ ID NO: 326 - DNA, 18 bp, Artificial sequence
  Synthetic oligonucleotide
gcacgcggccctgttcca

SEQ ID NO: 327 - DNA, 18 bp, Artificial sequence
  Synthetic oligonucleotide
ccgcacgcggccctgttc

SEQ ID NO: 328 - DNA, 18 bp, Artificial sequence
  Synthetic oligonucleotide
gcccgcacgcggccctgt

SEQ ID NO: 329 - DNA, 18 bp, Artificial sequence
  Synthetic oligonucleotide
cggcccgcacgcggccct

SEQ ID NO: 330 - DNA, 18 bp, Artificial sequence
  Synthetic oligonucleotide
ggcggcccgcacgcggcc

SEQ ID NO: 331 - DNA, 18 bp, Artificial sequence
  Synthetic oligonucleotide
gtggcggcccgcacgcgg

SEQ ID NO: 332 - DNA, 18 bp, Artificial sequence
  Synthetic oligonucleotide
cagtggcggcccgcacgc

SEQ ID NO: 333 - DNA, 18 bp, Artificial sequence
  Synthetic oligonucleotide
cacagtggcggcccgcac

SEQ ID NO: 334 - DNA, 18 bp, Artificial sequence
  Synthetic oligonucleotide
cccacagtggcggcccgc

SEQ ID NO: 335 - DNA, 18 bp, Artificial sequence
  Synthetic oligonucleotide
agcccacagtggcggccc

SEQ ID NO: 336 - DNA, 18 bp, Artificial sequence
  Synthetic oligonucleotide
ggagcccacagtggcggc

SEQ ID NO: 337 - DNA, 18 bp, Artificial sequence
  Synthetic oligonucleotide
ccagggagcccacagtgg

SEQ ID NO: 338 - DNA, 18 bp, Artificial sequence
  Synthetic oligonucleotide
ggccagggagcccacagt

SEQ ID NO: 339 - DNA, 18 bp, Artificial sequence
  Synthetic oligonucleotide
ccggccagggagcccaca

SEQ ID NO: 340 - DNA, 18 bp, Artificial sequence
  Synthetic oligonucleotide
ggccggccagggagccca

SEQ ID NO: 341 - DNA, 18 bp, Artificial sequence
  Synthetic oligonucleotide
ctggccggccagggagcc

SEQ ID NO: 342 - DNA, 18 bp, Artificial sequence
  Synthetic oligonucleotide
ggctggccggccagggag

SEQ ID NO: 343 - DNA, 18 bp, Artificial sequence
  Synthetic oligonucleotide
agcggctggccggccagg

SEQ ID NO: 344 - DNA, 18 bp, Artificial sequence
  Synthetic oligonucleotide
gtagcggctggccggcca

SEQ ID NO: 345 - DNA, 18 bp, Artificial sequence
  Synthetic oligonucleotide
ctgtagcggctggccggc

SEQ ID NO: 346 - DNA, 18 bp, Artificial sequence
  Synthetic oligonucleotide
tcctgtagcggctggccg

SEQ ID NO: 347 - DNA, 18 bp, Artificial sequence
  Synthetic oligonucleotide
gctcctgtagcggctggc

SEQ ID NO: 348 - DNA, 18 bp, Artificial sequence
  Synthetic oligonucleotide
ccgctcctgtagcggctg

SEQ ID NO: 349 - DNA, 18 bp, Artificial sequence
  Synthetic oligonucleotide
gggcccgctcctgtagcg

SEQ ID NO: 350 - DNA, 18 bp, Artificial sequence
  Synthetic oligonucleotide
ctgggcccgctcctgtag

SEQ ID NO: 351 - DNA, 18 bp, Artificial sequence
  Synthetic oligonucleotide
gcctgggcccgctcctgt

SEQ ID NO: 352 - DNA, 18 bp, Artificial sequence
  Synthetic oligonucleotide
aggcctgggcccgctcct

SEQ ID NO: 353 - DNA, 18 bp, Artificial sequence
  Synthetic oligonucleotide
ccaggcctgggcccgctc

SEQ ID NO: 354 - DNA, 18 bp, Artificial sequence
  Synthetic oligonucleotide
ccccaggcctgggcccgc

SEQ ID NO: 355 - DNA, 18 bp, Artificial sequence
  Synthetic oligonucleotide
cgccccaggcctgggccc

SEQ ID NO: 356 - DNA, 18 bp, Artificial sequence
  Synthetic oligonucleotide
cgctcgccccaggcctgg

SEQ ID NO: 357 - DNA, 18 bp, Artificial sequence
  Synthetic oligonucleotide
gccgctcgccccaggcct

SEQ ID NO: 358 - DNA, 18 bp, Artificial sequence
  Synthetic oligonucleotide
cagccgctcgccccaggc

SEQ ID NO: 359 - DNA, 18 bp, Artificial sequence
  Synthetic oligonucleotide
cgcagccgctcgccccag

SEQ ID NO: 360 - DNA, 18 bp, Artificial sequence
  Synthetic oligonucleotide
cgcgcagccgctcgcccc

SEQ ID NO: 361 - DNA, 18 bp, Artificial sequence
  Synthetic oligonucleotide
cgcgcgcagccgctcgcc

SEQ ID NO: 362 - DNA, 18 bp, Artificial sequence
  Synthetic oligonucleotide
cgcgcgcgcagccgctcg

SEQ ID NO: 363 - DNA, 18 bp, Artificial sequence
  Synthetic oligonucleotide
tccgcgcgcgcagccgct

SEQ ID NO: 364 - DNA, 18 bp, Artificial sequence
  Synthetic oligonucleotide
catccgcgcgcgcagccg

SEQ ID NO: 365 - DNA, 18 bp, Artificial sequence
  Synthetic oligonucleotide
tccatccgcgcgcgcagc

SEQ ID NO: 366 - DNA, 18 bp, Artificial sequence
  Synthetic oligonucleotide
cctccatccgcgcgcgca

SEQ ID NO: 367 - DNA, 18 bp, Artificial sequence
  Synthetic oligonucleotide
ctcctccatccgcgcgcg

SEQ ID NO: 368 - DNA, 18 bp, Artificial sequence
  Synthetic oligonucleotide
atctcctccatccgcgcg

SEQ ID NO: 369 - DNA, 18 bp, Artificial sequence
  Synthetic oligonucleotide
ccatctcctccatccgcg

SEQ ID NO: 370 - DNA, 18 bp, Artificial sequence
  Synthetic oligonucleotide
gcccatctcctccatccg

SEQ ID NO: 371 - DNA, 18 bp, Artificial sequence
  Synthetic oligonucleotide
ggctgcccatctcctcca

SEQ ID NO: 372 - DNA, 18 bp, Artificial sequence
  Synthetic oligonucleotide
ccggctgcccatctcctc

SEQ ID NO: 373 - DNA, 18 bp, Artificial sequence
  Synthetic oligonucleotide
gtccggctgcccatctcc

SEQ ID NO: 374 - DNA, 18 bp, Artificial sequence
  Synthetic oligonucleotide
gggtccggctgcccatct

SEQ ID NO: 375 - DNA, 18 bp, Artificial sequence
  Synthetic oligonucleotide
gcgggtccggctgcccat

SEQ ID NO: 376 - DNA, 18 bp, Artificial sequence
  Synthetic oligonucleotide
tcgcgggtccggctgccc

SEQ ID NO: 377 - DNA, 18 bp, Artificial sequence
  Synthetic oligonucleotide
ggtcgcgggtccggctgc

SEQ ID NO: 378 - DNA, 18 bp, Artificial sequence
  Synthetic oligonucleotide
gcggtcgcgggtccggct

SEQ ID NO: 379 - DNA, 18 bp, Artificial sequence
  Synthetic oligonucleotide
aggcggtcgcgggtccgg

SEQ ID NO: 380 - DNA, 18 bp, Artificial sequence
  Synthetic oligonucleotide
ccaggcggtcgcgggtcc

SEQ ID NO: 381 - DNA, 18 bp, Artificial sequence
  Synthetic oligonucleotide
gtccaggcggtcgcgggt

SEQ ID NO: 382 - DNA, 18 bp, Artificial sequence
  Synthetic oligonucleotide
acctgctccttcacctcg

SEQ ID NO: 383 - DNA, 18 bp, Artificial sequence
  Synthetic oligonucleotide
ccacctgctccttcacct

SEQ ID NO: 384 - DNA, 18 bp, Artificial sequence
  Synthetic oligonucleotide
cgccacctgctccttcac

SEQ ID NO: 385 - DNA, 18 bp, Artificial sequence
  Synthetic oligonucleotide
tccgccacctgctccttc

SEQ ID NO: 386 - DNA, 18 bp, Artificial sequence
  Synthetic oligonucleotide
cctccgccacctgctcct

SEQ ID NO: 387 - DNA, 18 bp, Artificial sequence
  Synthetic oligonucleotide
cacctccgccacctgctc

SEQ ID NO: 388 - DNA, 18 bp, Artificial sequence
  Synthetic oligonucleotide
cgcacctccgccacctgc

SEQ ID NO: 389 - DNA, 18 bp, Artificial sequence
  Synthetic oligonucleotide
cgcgcacctccgccacct

SEQ ID NO: 390 - DNA, 18 bp, Artificial sequence
  Synthetic oligonucleotide
ggcgcgcacctccgccac

SEQ ID NO: 391 - DNA, 18 bp, Artificial sequence
  Synthetic oligonucleotide
ttggcgcgcacctccgcc

SEQ ID NO: 392 - DNA, 18 bp, Artificial sequence
  Synthetic oligonucleotide
gcttggcgcgcacctccg

SEQ ID NO: 393 - DNA, 18 bp, Artificial sequence
  Synthetic oligonucleotide
cagcttggcgcgcacctc

SEQ ID NO: 394 - DNA, 18 bp, Artificial sequence
  Synthetic oligonucleotide
cctccagcttggcgcgca

SEQ ID NO: 395 - DNA, 18 bp, Artificial sequence
  Synthetic oligonucleotide
ctcctccagcttggcgcg

SEQ ID NO: 396 - DNA, 18 bp, Artificial sequence
  Synthetic oligonucleotide
tgctcctccagcttggcg

SEQ ID NO: 397 - DNA, 18 bp, Artificial sequence
  Synthetic oligonucleotide
cctgctcctccagcttgg

SEQ ID NO: 398 - DNA, 18 bp, Artificial sequence
  Synthetic oligonucleotide
ggcctgctcctccagctt

SEQ ID NO: 399 - DNA, 18 bp, Artificial sequence
  Synthetic oligonucleotide
tgggcctgctcctccagc

SEQ ID NO: 400 - DNA, 18 bp, Artificial sequence
  Synthetic oligonucleotide
gctgggcctgctcctcca

SEQ ID NO: 401 - DNA, 18 bp, Artificial sequence
  Synthetic oligonucleotide
ctgctgggcctgctcctc

SEQ ID NO: 402 - DNA, 18 bp, Artificial sequence
  Synthetic oligonucleotide
atctgctgggcctgctcc

SEQ ID NO: 403 - DNA, 18 bp, Artificial sequence
  Synthetic oligonucleotide
gtatctgctgggcctgct

SEQ ID NO: 404 - DNA, 18 bp, Artificial sequence
  Synthetic oligonucleotide
ggcctcggcctgcaggcg

SEQ ID NO: 405 - DNA, 18 bp, Artificial sequence
  Synthetic oligonucleotide
aaggcctcggcctgcagg

SEQ ID NO: 406 - DNA, 18 bp, Artificial sequence
  Synthetic oligonucleotide
ggaaggcctcggcctgca

SEQ ID NO: 407 - DNA, 18 bp, Artificial sequence
  Synthetic oligonucleotide
ctggaaggcctcggcctg

SEQ ID NO: 408 - DNA, 18 bp, Artificial sequence
  Synthetic oligonucleotide
gcctggaaggcctcggcc

SEQ ID NO: 409 - DNA, 18 bp, Artificial sequence
  Synthetic oligonucleotide
gggcctggaaggcctcgg

SEQ ID NO: 410 - DNA, 18 bp, Artificial sequence
  Synthetic oligonucleotide
gcgggcctggaaggcctc

SEQ ID NO: 411 - DNA, 18 bp, Artificial sequence
  Synthetic oligonucleotide
aggcgggcctggaaggcc

SEQ ID NO: 412 - DNA, 18 bp, Artificial sequence
  Synthetic oligonucleotide
tgaggcgggcctggaagg

SEQ ID NO: 413 - DNA, 18 bp, Artificial sequence
  Synthetic oligonucleotide
cttgaggcgggcctggaa

SEQ ID NO: 414 - DNA, 18 bp, Artificial sequence
  Synthetic oligonucleotide
agctcttgaggcgggcct

SEQ ID NO: 415 - DNA, 18 bp, Artificial sequence
  Synthetic oligonucleotide
ccagctcttgaggcgggc

SEQ ID NO: 416 - DNA, 18 bp, Artificial sequence
  Synthetic oligonucleotide
aaccagctcttgaggcgg

SEQ ID NO: 417 - DNA, 18 bp, Artificial sequence
  Synthetic oligonucleotide
cgaaccagctcttgaggc

SEQ ID NO: 418 - DNA, 18 bp, Artificial sequence
  Synthetic oligonucleotide
ctcgaaccagctcttgag

SEQ ID NO: 419 - DNA, 18 bp, Artificial sequence
  Synthetic oligonucleotide
ggctcgaaccagctcttg

SEQ ID NO: 420 - DNA, 18 bp, Artificial sequence
  Synthetic oligonucleotide
gcatgtcttccaccaggg

SEQ ID NO: 421 - DNA, 18 bp, Artificial sequence
  Synthetic oligonucleotide
ctgcatgtcttccaccag

SEQ ID NO: 422 - DNA, 18 bp, Artificial sequence
  Synthetic oligonucleotide
cgctgcatgtcttccacc

SEQ ID NO: 423 - DNA, 18 bp, Artificial sequence
  Synthetic oligonucleotide
agcccggcccactggcgc

SEQ ID NO: 424 - DNA, 18 bp, Artificial sequence
  Synthetic oligonucleotide
ccagcccggcccactggc

SEQ ID NO: 425 - DNA, 18 bp, Artificial sequence
  Synthetic oligonucleotide
caccagcccggcccactg

SEQ ID NO: 426 - DNA, 18 bp, Artificial sequence
  Synthetic oligonucleotide
tccaccagcccggcccac

SEQ ID NO: 427 - DNA, 18 bp, Artificial sequence
  Synthetic oligonucleotide
tctccaccagcccggccc

SEQ ID NO: 428 - DNA, 18 bp, Artificial sequence
  Synthetic oligonucleotide
cttctccaccagcccggc

SEQ ID NO: 429 - DNA, 18 bp, Artificial sequence
  Synthetic oligonucleotide
accttctccaccagcccg

SEQ ID NO: 430 - DNA, 18 bp, Artificial sequence
  Synthetic oligonucleotide
ctgcaccttctccaccag

SEQ ID NO: 431 - DNA, 18 bp, Artificial sequence
  Synthetic oligonucleotide
gcctgcaccttctccacc

SEQ ID NO: 432 - DNA, 18 bp, Artificial sequence
  Synthetic oligonucleotide
cagcctgcaccttctcca

SEQ ID NO: 433 - DNA, 18 bp, Artificial sequence
  Synthetic oligonucleotide
ggcagcctgcaccttctc

SEQ ID NO: 434 - DNA, 18 bp, Artificial sequence
  Synthetic oligonucleotide
acggcagcctgcaccttc

SEQ ID NO: 435 - DNA, 18 bp, Artificial sequence
  Synthetic oligonucleotide
ccacggcagcctgcacct

SEQ ID NO: 436 - DNA, 18 bp, Artificial sequence
  Synthetic oligonucleotide
gcccacggcagcctgcac

SEQ ID NO: 437 - DNA, 18 bp, Artificial sequence
  Synthetic oligonucleotide
gtgcccacggcagcctgc

SEQ ID NO: 438 - DNA, 18 bp, Artificial sequence
  Synthetic oligonucleotide
tggtgcccacggcagcct

SEQ ID NO: 439 - DNA, 18 bp, Artificial sequence
  Synthetic oligonucleotide
gctggtgcccacggcagc

SEQ ID NO: 440 - DNA, 18 bp, Artificial sequence
  Synthetic oligonucleotide
gcgctggtgcccacggca

SEQ ID NO: 441 - DNA, 18 bp, Artificial sequence
  Synthetic oligonucleotide
attgtcgctgggcacagg

SEQ ID NO: 442 - DNA, 18 bp, Artificial sequence
  Synthetic oligonucleotide
tgattgtcgctgggcaca

SEQ ID NO: 443 - DNA, 18 bp, Artificial sequence
  Synthetic oligonucleotide
agtgattgtcgctgggca

SEQ ID NO: 444 - DNA, 18 bp, Artificial sequence
  Synthetic oligonucleotide
tcagtgattgtcgctggg

SEQ ID NO: 445 - DNA, 18 bp, Artificial sequence
  Synthetic oligonucleotide
gttcagtgattgtcgctg

SEQ ID NO: 446 - DNA, 18 bp, Artificial sequence
  Synthetic oligonucleotide
tggctgcaggcttcggcg

SEQ ID NO: 447 - DNA, 18 bp, Artificial sequence
  Synthetic oligonucleotide
catggctgcaggcttcgg

SEQ ID NO: 448 - DNA, 18 bp, Artificial sequence
  Synthetic oligonucleotide
tcgcatggctgcaggctt

SEQ ID NO: 449 - DNA, 18 bp, Artificial sequence
  Synthetic oligonucleotide
gggtcgcatggctgcagg

SEQ ID NO: 450 - DNA, 18 bp, Artificial sequence
  Synthetic oligonucleotide
ggaggcaggaggcacggg

SEQ ID NO: 451 - DNA, 18 bp, Artificial sequence
  Synthetic oligonucleotide
gcggaggcaggaggcacg

SEQ ID NO: 452 - DNA, 18 bp, Artificial sequence
  Synthetic oligonucleotide
gcgcggaggcaggaggca

SEQ ID NO: 453 - DNA, 18 bp, Artificial sequence
  Synthetic oligonucleotide
ctgcgcggaggcaggagg

SEQ ID NO: 454 - DNA, 18 bp, Artificial sequence
  Synthetic oligonucleotide
ggctgcgcggaggcagga

SEQ ID NO: 455 - DNA, 18 bp, Artificial sequence
  Synthetic oligonucleotide
caggctgcgcggaggcag

SEQ ID NO: 456 - DNA, 18 bp, Artificial sequence
  Synthetic oligonucleotide
tgcaggctgcgcggaggc

SEQ ID NO: 457 - DNA, 18 bp, Artificial sequence
  Synthetic oligonucleotide
gctgcaggctgcgcggag

SEQ ID NO: 458 - DNA, 18 bp, Artificial sequence
  Synthetic oligonucleotide
ccgctgcaggctgcgcgg

SEQ ID NO: 459 - DNA, 18 bp, Artificial sequence
  Synthetic oligonucleotide
tcccgctgcaggctgcgc

SEQ ID NO: 460 - DNA, 18 bp, Artificial sequence
  Synthetic oligonucleotide
tctcccgctgcaggctgc

SEQ ID NO: 461 - DNA, 18 bp, Artificial sequence
  Synthetic oligonucleotide
ggtctcccgctgcaggct

SEQ ID NO: 462 - DNA, 18 bp, Artificial sequence
  Synthetic oligonucleotide
agggtctcccgctgcagg

SEQ ID NO: 463 - DNA, 18 bp, Artificial sequence
  Synthetic oligonucleotide
acagggtctcccgctgca

SEQ ID NO: 464 - DNA, 18 bp, Artificial sequence
  Synthetic oligonucleotide
ggacagggtctcccgctg

SEQ ID NO: 465 - DNA, 18 bp, Artificial sequence
  Synthetic oligonucleotide
cccaggaggacggctggg

SEQ ID NO: 466 - DNA, 18 bp, Artificial sequence
  Synthetic oligonucleotide
accccaggaggacggctg

SEQ ID NO: 467 - DNA, 18 bp, Artificial sequence
  Synthetic oligonucleotide
ccaccccaggaggacggc

SEQ ID NO: 468 - DNA, 18 bp, Artificial sequence
  Synthetic oligonucleotide
gtccaccccaggaggacg

SEQ ID NO: 469 - DNA, 18 bp, Artificial sequence
  Synthetic oligonucleotide
gggtccaccccaggagga

SEQ ID NO: 470 - DNA, 18 bp, Artificial sequence
  Synthetic oligonucleotide
tagggtccaccccaggag

SEQ ID NO: 471 - DNA, 18 bp, Artificial sequence
  Synthetic oligonucleotide
actagggtccaccccagg

SEQ ID NO: 472 - DNA, 18 bp, Artificial sequence
  Synthetic oligonucleotide
ttaaactagggtccaccc

SEQ ID NO: 473 - DNA, 18 bp, Artificial sequence
  Synthetic oligonucleotide
tattaaactagggtccac

SEQ ID NO: 474 - DNA, 18 bp, Artificial sequence
  Synthetic oligonucleotide
tttattaaactagggtcc

SEQ ID NO: 475 - DNA, 18 bp, Artificial sequence
  Synthetic oligonucleotide
tctttattaaactagggt

SEQ ID NO: 476 - DNA, 18 bp, Artificial sequence
  Synthetic oligonucleotide
aatctttattaaactagg

SEQ ID NO: 477 - DNA, 18 bp, Artificial sequence
  Synthetic oligonucleotide
tgaatctttattaaacta

SEQ ID NO: 478 - DNA, 18 bp, Artificial sequence
  Synthetic oligonucleotide
ggtgaatctttattaaac

SEQ ID NO: 479 - DNA, 18 bp, Artificial sequence
  Synthetic oligonucleotide
ttggtgaatctttattaa

SEQ ID NO: 480 - DNA, 18 bp, Artificial sequence
  Synthetic oligonucleotide
acttggtgaatctttatt

SEQ ID NO: 481 - DNA, 18 bp, Artificial sequence
  Synthetic oligonucleotide
aaacttggtgaatcttta

SEQ ID NO: 482 - DNA, 18 bp, Artificial sequence
  Synthetic oligonucleotide
tgaaacttggtgaatctt

SEQ ID NO: 483 - DNA, 18 bp, Artificial sequence
  Synthetic oligonucleotide
cgtgaaacttggtgaatc

SEQ ID NO: 484 - DNA, 18 bp, Artificial sequence
  Synthetic oligonucleotide
acctgccaggaatgtgac

SEQ ID NO: 485 - DNA, 18 bp, Artificial sequence
  Synthetic oligonucleotide
aagccccgcccccatacc

SEQ ID NO: 486 - DNA, 18 bp, Artificial sequence
  Synthetic oligonucleotide
tgaggtgaggatgagagg

SEQ ID NO: 487 - DNA, 18 bp, Artificial sequence
  Synthetic oligonucleotide
cagggtctgcctgaatgg

SEQ ID NO: 488 - DNA, 18 bp, Artificial sequence
  Synthetic oligonucleotide
agaagcctcagaagaggg

SEQ ID NO: 489 - DNA, 18 bp, Artificial sequence
  Synthetic oligonucleotide
gccaggaagcagcacaga

SEQ ID NO: 490 - DNA, 18 bp, Artificial sequence
  Synthetic oligonucleotide
aaatcgctgttcagagcc

SEQ ID NO: 491 - DNA, 18 bp, Artificial sequence
  Synthetic oligonucleotide
accgaggcccagagagcg

SEQ ID NO: 492 - DNA, 18 bp, Artificial sequence
  Synthetic oligonucleotide
tcctatctcaaggatggg

SEQ ID NO: 493 - DNA, 18 bp, Artificial sequence
  Synthetic oligonucleotide
aaaacaacttctaactcc

SEQ ID NO: 494 - DNA, 18 bp, Artificial sequence
  Synthetic oligonucleotide
tcgaaacgggcagatcac

SEQ ID NO: 495 - DNA, 18 bp, Artificial sequence
  Synthetic oligonucleotide
aactcccagccaggtgcg

SEQ ID NO: 496 - DNA, 18 bp, Artificial sequence
  Synthetic oligonucleotide
gcattagaaacctctaac

SEQ ID NO: 497 - DNA, 18 bp, Artificial sequence
  Synthetic oligonucleotide
ctatctgcctgcaatgca

SEQ ID NO: 498 - DNA, 18 bp, Artificial sequence
  Synthetic oligonucleotide
agatcacagctgccccgt

SEQ ID NO: 499 - DNA, 18 bp, Artificial sequence
  Synthetic oligonucleotide
ggtgatggagaataaaga

SEQ ID NO: 500 - DNA, 18 bp, Artificial sequence
  Synthetic oligonucleotide
ccaggcagggctgtgtgg

SEQ ID NO: 501 - DNA, 18 bp, Artificial sequence
  Synthetic oligonucleotide
gtgtccttgtgtgcccca

SEQ ID NO: 502 - DNA, 18 bp, Artificial sequence
  Synthetic oligonucleotide
aaaagcatgtattgagtg

SEQ ID NO: 503 - DNA, 18 bp, Artificial sequence
  Synthetic oligonucleotide
gcacaggtgtgtggcacc

SEQ ID NO: 504 - DNA, 18 bp, Artificial sequence
  Synthetic oligonucleotide
ctgaacatggttcactgc

SEQ ID NO: 505 - DNA, 18 bp, Artificial sequence
  Synthetic oligonucleotide
gtatttataaacagggtc

SEQ ID NO: 506 - DNA, 18 bp, Artificial sequence
  Synthetic oligonucleotide
cttggaaagcattatgta

SEQ ID NO: 507 - DNA, 18 bp, Artificial sequence
  Synthetic oligonucleotide
gagtcggtttaatcactt

SEQ ID NO: 508 - DNA, 18 bp, Artificial sequence
  Synthetic oligonucleotide
ggagccatggtgggcagg

SEQ ID NO: 509 - DNA, 18 bp, Artificial sequence
  Synthetic oligonucleotide
cacaaatgcttctttgga

SEQ ID NO: 510 - DNA, 18 bp, Artificial sequence
  Synthetic oligonucleotide
acacagaaggtgctccac

SEQ ID NO: 511 - DNA, 18 bp, Artificial sequence
  Synthetic oligonucleotide
ggcatctagtacctaggg

SEQ ID NO: 512 - DNA, 18 bp, Artificial sequence
  Synthetic oligonucleotide
ttctgaccccgtccaggc

SEQ ID NO: 513 - DNA, 18 bp, Artificial sequence
  Synthetic oligonucleotide
agttcaaggtgggtcagg

SEQ ID NO: 514 - DNA, 18 bp, Artificial sequence
  Synthetic oligonucleotide
atcctgtgtggaacaagt

SEQ ID NO: 515 - DNA, 18 bp, Artificial sequence
  Synthetic oligonucleotide
acctcagttcctgggtga

SEQ ID NO: 516 - DNA, 18 bp, Artificial sequence
  Synthetic oligonucleotide
ggtcaagggccaggatgg

SEQ ID NO: 517 - DNA, 18 bp, Artificial sequence
  Synthetic oligonucleotide
gccgcccaccaggagggt

SEQ ID NO: 518 - DNA, 18 bp, Artificial sequence
  Synthetic oligonucleotide
atgaaacctggacctggg

SEQ ID NO: 519 - DNA, 18 bp, Artificial sequence
  Synthetic oligonucleotide
caagacttagcgacaggg

SEQ ID NO: 520 - DNA, 18 bp, Artificial sequence
  Synthetic oligonucleotide
gagacccaggccccccaa

SEQ ID NO: 521 - DNA, 18 bp, Artificial sequence
  Synthetic oligonucleotide
aagctagaaccagcagag

SEQ ID NO: 522 - DNA, 18 bp, Artificial sequence
  Synthetic oligonucleotide
cagaaatgggaagaggaa

SEQ ID NO: 523 - DNA, 18 bp, Artificial sequence
  Synthetic oligonucleotide
gctaaagccaggagtcag

SEQ ID NO: 524 - DNA, 18 bp, Artificial sequence
  Synthetic oligonucleotide
agagaattccagagagct

SEQ ID NO: 525 - DNA, 18 bp, Artificial sequence
  Synthetic oligonucleotide
agacaaagctgagagaga

SEQ ID NO: 526 - DNA, 18 bp, Artificial sequence
  Synthetic oligonucleotide
tcagaagggaagagagag

SEQ ID NO: 527 - DNA, 18 bp, Artificial sequence
  Synthetic oligonucleotide
gtgtgagagactgagtca

SEQ ID NO: 528 - DNA, 18 bp, Artificial sequence
  Synthetic oligonucleotide
acagagccaggacgagtg

SEQ ID NO: 529 - DNA, 18 bp, Artificial sequence
  Synthetic oligonucleotide
tagggaaggacagagaca

SEQ ID NO: 530 - DNA, 18 bp, Artificial sequence
  Synthetic oligonucleotide
tctatataaaagagctag

SEQ ID NO: 531 - DNA, 18 bp, Artificial sequence
  Synthetic oligonucleotide
gaccccatctctctgtct

SEQ ID NO: 532 - DNA, 18 bp, Artificial sequence
  Synthetic oligonucleotide
taggaggccgggcaaggt

SEQ ID NO: 533 - DNA, 18 bp, Artificial sequence
  Synthetic oligonucleotide
agacgaagaaggagctag

SEQ ID NO: 534 - DNA, 18 bp, Artificial sequence
  Synthetic oligonucleotide
agagggcagaggcagaga

SEQ ID NO: 535 - DNA, 18 bp, Artificial sequence
  Synthetic oligonucleotide
gcagagagcagatgcaga

SEQ ID NO: 536 - DNA, 18 bp, Artificial sequence
  Synthetic oligonucleotide
cgagagaaggagacagag

SEQ ID NO: 537 - DNA, 18 bp, Artificial sequence
  Synthetic oligonucleotide
gagccagagagacccaag

SEQ ID NO: 538 - DNA, 18 bp, Artificial sequence
  Synthetic oligonucleotide
tcgcacagtgggaggcgg

SEQ ID NO: 539 - DNA, 18 bp, Artificial sequence
  Synthetic oligonucleotide
ctgcggccgagagggcgg

SEQ ID NO: 540 - DNA, 18 bp, Artificial sequence
  Synthetic oligonucleotide
ttctcaccggctcctggg

SEQ ID NO: 541 - DNA, 18 bp, Artificial sequence
  Synthetic oligonucleotide
cccctgagctcatccccg

SEQ ID NO: 542 - DNA, 18 bp, Artificial sequence
  Synthetic oligonucleotide
cgttcagtgattgtcgct

SEQ ID NO: 543 - DNA, 18 bp, Artificial sequence
  Synthetic oligonucleotide
cgcatggctgcaggcttc

SEQ ID NO: 544 - DNA, 18 bp, Artificial sequence
  Synthetic oligonucleotide
gcgttcagtgattgtcgc

SEQ ID NO: 545 - DNA, 18 bp, Artificial sequence
  Synthetic oligonucleotide
cggcgttcagtgattgtc

SEQ ID NO: 546 - DNA, 18 bp, Artificial sequence
  Synthetic oligonucleotide
ttcggcgttcagtgattg

SEQ ID NO: 547 - DNA, 18 bp, Artificial sequence
  Synthetic oligonucleotide
gcttcggcgttcagtgat

SEQ ID NO: 548 - DNA, 18 bp, Artificial sequence
  Synthetic oligonucleotide
aggcttcggcgttcagtg

SEQ ID NO: 549 - DNA, 18 bp, Artificial sequence
  Synthetic oligonucleotide
gcaggcttcggcgttcag

SEQ ID NO: 550 - DNA, 18 bp, Artificial sequence
  Synthetic oligonucleotide
ctgcaggcttcggcgttc

SEQ ID NO: 551 - DNA, 18 bp, Artificial sequence
  Synthetic oligonucleotide
ggctgcaggcttcggcgt

SEQ ID NO: 552 - DNA, 18 bp, Artificial sequence
  Synthetic oligonucleotide
atggctgcaggcttcggc

SEQ ID NO: 553 - DNA, 18 bp, Artificial sequence
  Synthetic oligonucleotide
ggtcgcatggctgcaggc

SEQ ID NO: 554 - DNA, 18 bp, Artificial sequence
  Synthetic oligonucleotide
cggaggcaggaggcacgg

SEQ ID NO: 555 - DNA, 18 bp, Artificial sequence
  Synthetic oligonucleotide
cgcggaggcaggaggcac

SEQ ID NO: 556 - DNA, 18 bp, Artificial sequence
  Synthetic oligonucleotide
tgcgcggaggcaggaggc

SEQ ID NO: 557 - DNA, 18 bp, Artificial sequence
  Synthetic oligonucleotide
gctgcgcggaggcaggag

SEQ ID NO: 558 - DNA, 18 bp, Artificial sequence
  Synthetic oligonucleotide
aggctgcgcggaggcagg

SEQ ID NO: 559 - DNA, 18 bp, Artificial sequence
  Synthetic oligonucleotide
gcaggctgcgcggaggca

SEQ ID NO: 560 - DNA, 18 bp, Artificial sequence
  Synthetic oligonucleotide
ctgcaggctgcgcggagg

SEQ ID NO: 561 - DNA, 18 bp, Artificial sequence
  Synthetic oligonucleotide
cgctgcaggctgcgcgga

SEQ ID NO: 562 - DNA, 18 bp, Artificial sequence
  Synthetic oligonucleotide
cccgctgcaggctgcgcg

SEQ ID NO: 563 - DNA, 18 bp, Artificial sequence
  Synthetic oligonucleotide
ctcccgctgcaggctgcg

SEQ ID NO: 564 - DNA, 18 bp, Artificial sequence
  Synthetic oligonucleotide
gtctcccgctgcaggctg

SEQ ID NO: 565 - DNA, 18 bp, Artificial sequence
  Synthetic oligonucleotide
gggtctcccgctgcaggc

SEQ ID NO: 566 - DNA, 18 bp, Artificial sequence
  Synthetic oligonucleotide
cagggtctcccgctgcag

SEQ ID NO: 567 - DNA, 18 bp, Artificial sequence
  Synthetic oligonucleotide
gacagggtctcccgctgc

SEQ ID NO: 568 - DNA, 18 bp, Artificial sequence
  Synthetic oligonucleotide
ccccaggaggacggctgg

SEQ ID NO: 569 - DNA, 18 bp, Artificial sequence
  Synthetic oligonucleotide
caccccaggaggacggct

SEQ ID NO: 570 - DNA, 18 bp, Artificial sequence
  Synthetic oligonucleotide
tccaccccaggaggacgg

SEQ ID NO: 571 - DNA, 18 bp, Artificial sequence
  Synthetic oligonucleotide
ggtccaccccaggaggac

SEQ ID NO: 572 - DNA, 18 bp, Artificial sequence
  Synthetic oligonucleotide
agggtccaccccaggagg

SEQ ID NO: 573 - DNA, 18 bp, Artificial sequence
  Synthetic oligonucleotide
ctagggtccaccccagga

SEQ ID NO: 574 - DNA, 18 bp, Artificial sequence
  Synthetic oligonucleotide
aactagggtccaccccag

SEQ ID NO: 575 - DNA, 18 bp, Artificial sequence
  Synthetic oligonucleotide
taaactagggtccacccc

SEQ ID NO: 576 - DNA, 18 bp, Artificial sequence
  Synthetic oligonucleotide
attaaactagggtccacc

SEQ ID NO: 577 - DNA, 18 bp, Artificial sequence
  Synthetic oligonucleotide
ttattaaactagggtcca

SEQ ID NO: 578 - DNA, 18 bp, Artificial sequence
  Synthetic oligonucleotide
ctttattaaactagggtc

SEQ ID NO: 579 - DNA, 18 bp, Artificial sequence
  Synthetic oligonucleotide
atctttattaaactaggg

SEQ ID NO: 580 - DNA, 18 bp, Artificial sequence
  Synthetic oligonucleotide
gaatctttattaaactag

SEQ ID NO: 581 - DNA, 18 bp, Artificial sequence
  Synthetic oligonucleotide
gtgaatctttattaaact

SEQ ID NO: 582 - DNA, 18 bp, Artificial sequence
  Synthetic oligonucleotide
tgcgtgaaacttggtgaa

SEQ ID NO: 583 - DNA, 18 bp, Artificial sequence
  Synthetic oligonucleotide
gtggggtcgcatggctgc

SEQ ID NO: 584 - DNA, 18 bp, Artificial sequence
  Synthetic oligonucleotide
ggggcggggacagggtct

SEQ ID NO: 585 - DNA, 18 bp, Artificial sequence
  Synthetic oligonucleotide
acggggtggcgtggggtc

SEQ ID NO: 586 - DNA, 18 bp, Artificial sequence
  Synthetic oligonucleotide
aggaggacggctggggcg

SEQ ID NO: 587 - DNA, 18 bp, Artificial sequence
  Synthetic oligonucleotide
ggacggctggggcgggga

SEQ ID NO: 588 - DNA, 18 bp, Artificial sequence
  Synthetic oligonucleotide
caaattccatccccccac

SEQ ID NO: 589 - DNA, 18 bp, Artificial sequence
  Synthetic oligonucleotide
cccattccctatttaact

SEQ ID NO: 590 - DNA, 18 bp, Artificial sequence
  Synthetic oligonucleotide
ggaggcacggggtggcgt

SEQ ID NO: 591 - DNA, 18 bp, Artificial sequence
  Synthetic oligonucleotide
ccggcctcaccccaggtt

SEQ ID NO: 592 - DNA, 18 bp, Artificial sequence
  Synthetic oligonucleotide
ccctatttaactccctcc

SEQ ID NO: 593 - DNA, 18 bp, Artificial sequence
  Synthetic oligonucleotide
tctcccttcacattctaa

SEQ ID NO: 594 - DNA, 18 bp, Artificial sequence
  Synthetic oligonucleotide
gggacagggtctcccgct

SEQ ID NO: 595 - DNA, 18 bp, Artificial sequence
  Synthetic oligonucleotide
aggcacggggtggcgtgg

SEQ ID NO: 596 - DNA, 18 bp, Artificial sequence
  Synthetic oligonucleotide
ggctggggcggggacagg

SEQ ID NO: 597 - DNA, 18 bp, Artificial sequence
  Synthetic oligonucleotide
tggcgtggggtcgcatgg

SEQ ID NO: 598 - DNA, 18 bp, Artificial sequence
  Synthetic oligonucleotide
tcgcattcctcattctcc

SEQ ID NO: 599 - DNA, 18 bp, Artificial sequence
  Synthetic oligonucleotide
ctggggcggggacagggt

SEQ ID NO: 600 - DNA, 18 bp, Artificial sequence
  Synthetic oligonucleotide
ccaggaggacggctgggg

SEQ ID NO: 601 - DNA, 18 bp, Artificial sequence
  Synthetic oligonucleotide
cggggacagggtctcccg

SEQ ID NO: 602 - DNA, 18 bp, Artificial sequence
  Synthetic oligonucleotide
ggtggcgtggggtcgcat

SEQ ID NO: 603 - DNA, 18 bp, Artificial sequence
  Synthetic oligonucleotide
gcgtggggtcgcatggct

SEQ ID NO: 604 - DNA, 18 bp, Artificial sequence
  Synthetic oligonucleotide
ggggtcgcatggctgcag

SEQ ID NO: 605 - DNA, 18 bp, Artificial sequence
  Synthetic oligonucleotide
gaggcaggaggcacgggg

SEQ ID NO: 606 - DNA, 18 bp, Artificial sequence
  Synthetic oligonucleotide
ggggtggcgtggggtcgc

SEQ ID NO: 607 - DNA, 18 bp, Artificial sequence
  Synthetic oligonucleotide
ggcaggaggcacggggtg

SEQ ID NO: 608 - DNA, 18 bp, Artificial sequence
  Synthetic oligonucleotide
ggcggggacagggtctcc

SEQ ID NO: 609 - DNA, 18 bp, Artificial sequence
  Synthetic oligonucleotide
acggctggggcggggaca

SEQ ID NO: 610 - DNA, 18 bp, Artificial sequence
  Synthetic oligonucleotide
ggccttcaactccttcat

SEQ ID NO: 611 - DNA, 18 bp, Artificial sequence
  Synthetic oligonucleotide
gcacggggtggcgtgggg

SEQ ID NO: 612 - DNA, 18 bp, Artificial sequence
  Synthetic oligonucleotide
caggaggcacggggtggc

SEQ ID NO: 613 - DNA, 18 bp, Artificial sequence
  Synthetic oligonucleotide
gaggacggctggggcggg

SEQ ID NO: 614 - DNA, 18 bp, Artificial sequence
  Synthetic oligonucleotide
ggcgttcagtgattgtcg

SEQ ID NO: 615 - DNA, 18 bp, Artificial sequence
  Synthetic oligonucleotide
tcggcgttcagtgattgt

SEQ ID NO: 616 - DNA, 18 bp, Artificial sequence
  Synthetic oligonucleotide
cttcggcgttcagtgatt

SEQ ID NO: 617 - DNA, 18 bp, Artificial sequence
  Synthetic oligonucleotide
ggcttcggcgttcagtga

SEQ ID NO: 618 - DNA, 18 bp, Artificial sequence
  Synthetic oligonucleotide
caggcttcggcgttcagt

SEQ ID NO: 619 - DNA, 18 bp, Artificial sequence
  Synthetic oligonucleotide
tgcaggcttcggcgttca

SEQ ID NO: 620 - DNA, 18 bp, Artificial sequence
  Synthetic oligonucleotide
gctgcaggcttcggcgtt

SEQ ID NO: 621 - DNA, 18 bp, Artificial sequence
  Synthetic oligonucleotide
aaactagggtccacccca

SEQ ID NO: 622 - DNA, 18 bp, Artificial sequence
  Synthetic oligonucleotide
tggtgaatctttattaaa

SEQ ID NO: 623 - DNA, 18 bp, Artificial sequence
  Synthetic oligonucleotide
cttggtgaatctttatta

SEQ ID NO: 624 - DNA, 18 bp, Artificial sequence
  Synthetic oligonucleotide
aacttggtgaatctttat

SEQ ID NO: 625 - DNA, 18 bp, Artificial sequence
  Synthetic oligonucleotide
gaaacttggtgaatcttt

SEQ ID NO: 626 - DNA, 18 bp, Artificial sequence
  Synthetic oligonucleotide
gtgaaacttggtgaatct

SEQ ID NO: 627 - DNA, 18 bp, Artificial sequence
  Synthetic oligonucleotide
gcgtgaaacttggtgaat

SEQ ID NO: 628 - DNA, 18 bp, Artificial sequence
  Synthetic oligonucleotide
gaggcacggggtggcgtg

SEQ ID NO: 629 - DNA, 18 bp, Artificial sequence
  Synthetic oligonucleotide
gacggctggggcggggac

SEQ ID NO: 630 - DNA, 18 bp, Artificial sequence
  Synthetic oligonucleotide
ggggacagggtctcccgc

SEQ ID NO: 631 - DNA, 18 bp, Artificial sequence
  Synthetic oligonucleotide
cggggtggcgtggggtcg

SEQ ID NO: 632 - DNA, 18 bp, Artificial sequence
  Synthetic oligonucleotide
atggcttacatcccagtc

SEQ ID NO: 633 - DNA, 18 bp, Artificial sequence
  Synthetic oligonucleotide
gcaggaggcacggggtgg

SEQ ID NO: 634 - DNA, 18 bp, Artificial sequence
  Synthetic oligonucleotide
caggaggacggctggggc

SEQ ID NO: 635 - DNA, 18 bp, Artificial sequence
  Synthetic oligonucleotide
ttcaaattccatcccccc

SEQ ID NO: 636 - DNA, 18 bp, Artificial sequence
  Synthetic oligonucleotide
cacggggtggcgtggggt

SEQ ID NO: 637 - DNA, 18 bp, Artificial sequence
  Synthetic oligonucleotide
cggctggggcggggacag

SEQ ID NO: 638 - DNA, 18 bp, Artificial sequence
  Synthetic oligonucleotide
gcggggacagggtctccc

SEQ ID NO: 639 - DNA, 18 bp, Artificial sequence
  Synthetic oligonucleotide
ggcacggggtggcgtggg

SEQ ID NO: 640 - DNA, 18 bp, Artificial sequence
  Synthetic oligonucleotide
aggaggcacggggtggcg

SEQ ID NO: 641 - DNA, 18 bp, Artificial sequence
  Synthetic oligonucleotide
aggcaggaggcacggggt

SEQ ID NO: 642 - DNA, 18 bp, Artificial sequence
  Synthetic oligonucleotide
tggggtcgcatggctgca

SEQ ID NO: 643 - DNA, 18 bp, Artificial sequence
  Synthetic oligonucleotide
gtggcgtggggtcgcatg

SEQ ID NO: 644 - DNA, 18 bp, Artificial sequence
  Synthetic oligonucleotide
aggacggctggggcgggg

SEQ ID NO: 645 - DNA, 18 bp, Artificial sequence
  Synthetic oligonucleotide
gggtggcgtggggtcgca

SEQ ID NO: 646 - DNA, 18 bp, Artificial sequence
  Synthetic oligonucleotide
ggcgtggggtcgcatggc

SEQ ID NO: 647 - DNA, 18 bp, Artificial sequence
  Synthetic oligonucleotide
cattccctatttaactcc

SEQ ID NO: 648 - DNA, 18 bp, Artificial sequence
  Synthetic oligonucleotide
gggcggggacagggtctc

SEQ ID NO: 649 - DNA, 18 bp, Artificial sequence
  Synthetic oligonucleotide
cgcattcctcattctccc

SEQ ID NO: 650 - DNA, 18 bp, Artificial sequence
  Synthetic oligonucleotide
caacttctaactcctatc

SEQ ID NO: 651 - DNA, 18 bp, Artificial sequence
  Synthetic oligonucleotide
ccggttccatctcagtcc

SEQ ID NO: 652 - DNA, 18 bp, Artificial sequence
  Synthetic oligonucleotide
cgtggggtcgcatggctg

SEQ ID NO: 653 - DNA, 18 bp, Artificial sequence
  Synthetic oligonucleotide
ggaggacggctggggcgg

SEQ ID NO: 654 - DNA, 18 bp, Artificial sequence
  Synthetic oligonucleotide
tggggcggggacagggtc

SEQ ID NO: 655 - DNA, 18 bp, Artificial sequence
  Synthetic oligonucleotide
cagcacatttaccaagcc

SEQ ID NO: 656 - DNA, 18 bp, Artificial sequence
  Synthetic oligonucleotide
gctggggcggggacaggg

SEQ ID NO: 657 - DNA, 18 bp, Artificial sequence
  Synthetic oligonucleotide
acacgtcctccatgtccg

SEQ ID NO: 658 - DNA, 18 bp, Artificial sequence
  Synthetic oligonucleotide
cacacgtcctccatgtcc

SEQ ID NO: 659 - DNA, 18 bp, Artificial sequence
  Synthetic oligonucleotide
gcacacgtcctccatgtc

SEQ ID NO: 660 - DNA, 18 bp, Artificial sequence
  Synthetic oligonucleotide
cgcacacgtcctccatgt

SEQ ID NO: 661 - DNA, 18 bp, Artificial sequence
  Synthetic oligonucleotide
ccgcacacgtcctccatg

SEQ ID NO: 662 - DNA, 18 bp, Artificial sequence
  Synthetic oligonucleotide
gccgcacacgtcctccat

SEQ ID NO: 663 - DNA, 18 bp, Artificial sequence
  Synthetic oligonucleotide
ggccgcacacgtcctcca

SEQ ID NO: 664 - DNA, 18 bp, Artificial sequence
  Synthetic oligonucleotide
cggccgcacacgtcctcc

SEQ ID NO: 665 - DNA, 18 bp, Artificial sequence
  Synthetic oligonucleotide
gcggccgcacacgtcctc

SEQ ID NO: 666 - DNA, 18 bp, Artificial sequence
  Synthetic oligonucleotide
ggcggccgcacacgtcct

SEQ ID NO: 667 - DNA, 18 bp, Artificial sequence
  Synthetic oligonucleotide
aggcggccgcacacgtcc

SEQ ID NO: 668 - DNA, 18 bp, Artificial sequence
  Synthetic oligonucleotide
caggcggccgcacacgtc

SEQ ID NO: 669 - DNA, 18 bp, Artificial sequence
  Synthetic oligonucleotide
ccaggcggccgcacacgt

SEQ ID NO: 670 - DNA, 18 bp, Artificial sequence
  Synthetic oligonucleotide
caccaggcggccgcacac

SEQ ID NO: 671 - DNA, 18 bp, Artificial sequence
  Synthetic oligonucleotide
tgcaccaggcggccgcac

SEQ ID NO: 672 - DNA, 18 bp, Artificial sequence
  Synthetic oligonucleotide
gcttctgcaggtcatcgg

SEQ ID NO: 673 - DNA, 18 bp, Artificial sequence
  Synthetic oligonucleotide
gcgcttctgcaggtcatc

SEQ ID NO: 674 - DNA, 18 bp, Artificial sequence
  Synthetic oligonucleotide
ggcgcttctgcaggtcat

SEQ ID NO: 675 - DNA, 18 bp, Artificial sequence
  Synthetic oligonucleotide
aggcgcttctgcaggtca

SEQ ID NO: 676 - DNA, 18 bp, Artificial sequence
  Synthetic oligonucleotide
caggcgcttctgcaggtc

SEQ ID NO: 677 - DNA, 18 bp, Artificial sequence
  Synthetic oligonucleotide
ccaggcgcttctgcaggt

SEQ ID NO: 678 - DNA, 18 bp, Artificial sequence
  Synthetic oligonucleotide
gccaggcgcttctgcagg

SEQ ID NO: 679 - DNA, 18 bp, Artificial sequence
  Synthetic oligonucleotide
tgccaggcgcttctgcag

SEQ ID NO: 680 - DNA, 18 bp, Artificial sequence
  Synthetic oligonucleotide
ctgccaggcgcttctgca

SEQ ID NO: 681 - DNA, 18 bp, Artificial sequence
  Synthetic oligonucleotide
actgccaggcgcttctgc

SEQ ID NO: 682 - DNA, 18 bp, Artificial sequence
  Synthetic oligonucleotide
cactgccaggcgcttctg

SEQ ID NO: 683 - DNA, 18 bp, Artificial sequence
  Synthetic oligonucleotide
acactgccaggcgcttct

SEQ ID NO: 684 - DNA, 18 bp, Artificial sequence
  Synthetic oligonucleotide
tacactgccaggcgcttc

SEQ ID NO: 685 - DNA, 18 bp, Artificial sequence
  Synthetic oligonucleotide
gtacactgccaggcgctt

SEQ ID NO: 686 - DNA, 18 bp, Artificial sequence
  Synthetic oligonucleotide
ggtacactgccaggcgct

SEQ ID NO: 687 - DNA, 18 bp, Artificial sequence
  Synthetic oligonucleotide
ctggtacactgccaggcg

SEQ ID NO: 688 - DNA, 18 bp, Artificial sequence
  Synthetic oligonucleotide
gcacgtcctccatgtccg

SEQ ID NO: 689 - DNA, 18 bp, Artificial sequence
  Synthetic oligonucleotide
cgcacgtcctccatgtcc

SEQ ID NO: 690 - DNA, 18 bp, Artificial sequence
  Synthetic oligonucleotide
gcgcacgtcctccatgtc

SEQ ID NO: 691 - DNA, 18 bp, Artificial sequence
  Synthetic oligonucleotide
cgcgcacgtcctccatgt

SEQ ID NO: 692 - DNA, 18 bp, Artificial sequence
  Synthetic oligonucleotide
ccgcgcacgtcctccatg

SEQ ID NO: 693 - DNA, 18 bp, Artificial sequence
  Synthetic oligonucleotide
gccgcgcacgtcctccat

SEQ ID NO: 694 - DNA, 18 bp, Artificial sequence
  Synthetic oligonucleotide
ggccgcgcacgtcctcca

SEQ ID NO: 695 - DNA, 18 bp, Artificial sequence
  Synthetic oligonucleotide
cggccgcgcacgtcctcc

SEQ ID NO: 696 - DNA, 18 bp, Artificial sequence
  Synthetic oligonucleotide
gcggccgcgcacgtcctc

SEQ ID NO: 697 - DNA, 18 bp, Artificial sequence
  Synthetic oligonucleotide
ggcggccgcgcacgtcct

SEQ ID NO: 698 - DNA, 18 bp, Artificial sequence
  Synthetic oligonucleotide
aggcggccgcgcacgtcc

SEQ ID NO: 699 - DNA, 18 bp, Artificial sequence
  Synthetic oligonucleotide
caggcggccgcgcacgtc

SEQ ID NO: 700 - DNA, 18 bp, Artificial sequence
  Synthetic oligonucleotide
ccaggcggccgcgcacgt

SEQ ID NO: 701 - DNA, 18 bp, Artificial sequence
  Synthetic oligonucleotide
accaggcggccgcgcacg

SEQ ID NO: 702 - DNA, 18 bp, Artificial sequence
  Synthetic oligonucleotide
caccaggcggccgcgcac

SEQ ID NO: 703 - DNA, 18 bp, Artificial sequence
  Synthetic oligonucleotide
gcaccaggcggccgcgca

SEQ ID NO: 704 - DNA, 18 bp, Artificial sequence
  Synthetic oligonucleotide
tgcaccaggcggccgcgc

SEQ ID NO: 705 - DNA, 18 bp, Artificial sequence
  Synthetic oligonucleotide
ctgcaccaggcggccgcg

SEQ ID NO: 706 - DNA, 18 bp, Artificial sequence
  Synthetic oligonucleotide
acttctgcaggtcatcgg

SEQ ID NO: 707 - DNA, 18 bp, Artificial sequence
  Synthetic oligonucleotide
cacttctgcaggtcatcg

SEQ ID NO: 708 - DNA, 18 bp, Artificial sequence
  Synthetic oligonucleotide
gcacttctgcaggtcatc

SEQ ID NO: 709 - DNA, 18 bp, Artificial sequence
  Synthetic oligonucleotide
ggcacttctgcaggtcat

SEQ ID NO: 710 - DNA, 18 bp, Artificial sequence
  Synthetic oligonucleotide
aggcacttctgcaggtca

SEQ ID NO: 711 - DNA, 18 bp, Artificial sequence
  Synthetic oligonucleotide
caggcacttctgcaggtc

SEQ ID NO: 712 - DNA, 18 bp, Artificial sequence
  Synthetic oligonucleotide
ccaggcacttctgcaggt

SEQ ID NO: 713 - DNA, 18 bp, Artificial sequence
  Synthetic oligonucleotide
gccaggcacttctgcagg

SEQ ID NO: 714 - DNA, 18 bp, Artificial sequence
  Synthetic oligonucleotide
tgccaggcacttctgcag

SEQ ID NO: 715 - DNA, 18 bp, Artificial sequence
  Synthetic oligonucleotide
ctgccaggcacttctgca

SEQ ID NO: 716 - DNA, 18 bp, Artificial sequence
  Synthetic oligonucleotide
actgccaggcacttctgc

SEQ ID NO: 717 - DNA, 18 bp, Artificial sequence
  Synthetic oligonucleotide
cactgccaggcacttctg

SEQ ID NO: 718 - DNA, 18 bp, Artificial sequence
  Synthetic oligonucleotide
acactgccaggcacttct

SEQ ID NO: 719 - DNA, 18 bp, Artificial sequence
  Synthetic oligonucleotide
tacactgccaggcacttc

SEQ ID NO: 720 - DNA, 18 bp, Artificial sequence
  Synthetic oligonucleotide
gtacactgccaggcactt

SEQ ID NO: 721 - DNA, 18 bp, Artificial sequence
  Synthetic oligonucleotide
ggtacactgccaggcact

SEQ ID NO: 722 - DNA, 18 bp, Artificial sequence
  Synthetic oligonucleotide
tggtacactgccaggcac

SEQ ID NO: 723 - DNA, 18 bp, Artificial sequence
  Synthetic oligonucleotide
ctggtacactgccaggca

SEQ ID NO: 724 - DNA, 18 bp, Artificial sequence
  Synthetic oligonucleotide
ggccagtcggctcctggg

SEQ ID NO: 725 - DNA, 18 bp, Artificial sequence
  Synthetic oligonucleotide
gattggccagtcggctcc

SEQ ID NO: 726 - DNA, 18 bp, Artificial sequence
  Synthetic oligonucleotide
gtgattggccagtcggct

SEQ ID NO: 727 - DNA, 18 bp, Artificial sequence
  Synthetic oligonucleotide
ctgtgattggccagtcgg

SEQ ID NO: 728 - DNA, 18 bp, Artificial sequence
  Synthetic oligonucleotide
tgccggccgcacccggcc

SEQ ID NO: 729 - DNA, 18 bp, Artificial sequence
  Synthetic oligonucleotide
tgtagcggctggcccggc

SEQ ID NO: 730 - DNA, 18 bp, Artificial sequence
  Synthetic oligonucleotide
catttctctccatccgcg

SEQ ID NO: 731 - DNA, 18 bp, Artificial sequence
  Synthetic oligonucleotide
ggtcccgctgcccatttc

SEQ ID NO: 732 - DNA, 18 bp, Artificial sequence
  Synthetic oligonucleotide
tctgtggcgcagctcggg

SEQ ID NO: 733 - DNA, 18 bp, Artificial sequence
  Synthetic oligonucleotide
gagcagctcctctgcact

SEQ ID NO: 734 - DNA, 18 bp, Artificial sequence
  Synthetic oligonucleotide
aacttagggtccactcct

SEQ ID NO: 735 - DNA, 20 bp, Artificial sequence
  Synthetic oligonucleotide
tatagggctccccctgtccc

SEQ ID NO: 736 - DNA, 20 bp, Artificial sequence
  Synthetic oligonucleotide
tccaattatagggctccccc

SEQ ID NO: 737 - DNA, 20 bp, Artificial sequence
  Synthetic oligonucleotide
agacttgtccaattataggg

SEQ ID NO: 738 - DNA, 20 bp, Artificial sequence
  Synthetic oligonucleotide
cgtccttcacctccgctggg

SEQ ID NO: 739 - DNA, 20 bp, Artificial sequence
  Synthetic oligonucleotide
tgtgaccagcaacgcagccc

SEQ ID NO: 740 - DNA, 20 bp, Artificial sequence
  Synthetic oligonucleotide
caggaatgtgaccagcaacg

SEQ ID NO: 741 - DNA, 20 bp, Artificial sequence
  Synthetic oligonucleotide
cggtctgctggcgcagctcg

SEQ ID NO: 742 - DNA, 20 bp, Artificial sequence
  Synthetic oligonucleotide
gccactcggtctgctggcgc

SEQ ID NO: 743 - DNA, 20 bp, Artificial sequence
  Synthetic oligonucleotide
aaagcgacccagtgccagtt

SEQ ID NO: 744 - DNA, 20 bp, Artificial sequence
  Synthetic oligonucleotide
aatcccaaaagcgacccagt

SEQ ID NO: 745 - DNA, 20 bp, Artificial sequence
  Synthetic oligonucleotide
gcaggtaatcccaaaagcga

SEQ ID NO: 746 - DNA, 20 bp, Artificial sequence
  Synthetic oligonucleotide
cccagcgcaggtaatcccaa

SEQ ID NO: 747 - DNA, 20 bp, Artificial sequence
  Synthetic oligonucleotide
gtctgcacccagcgcaggta

SEQ ID NO: 748 - DNA, 20 bp, Artificial sequence
  Synthetic oligonucleotide
ttccgatttgtaggccttca

SEQ ID NO: 749 - DNA, 20 bp, Artificial sequence
  Synthetic oligonucleotide
ctccagttccgatttgtagg

SEQ ID NO: 750 - DNA, 20 bp, Artificial sequence
  Synthetic oligonucleotide
gttgttcctccagttccgat

SEQ ID NO: 751 - DNA, 20 bp, Artificial sequence
  Synthetic oligonucleotide
cgtcctccatgtccgcgccc

SEQ ID NO: 752 - DNA, 20 bp, Artificial sequence
  Synthetic oligonucleotide
ggtactgcaccaggcggccg

SEQ ID NO: 753 - DNA, 20 bp, Artificial sequence
  Synthetic oligonucleotide
cgccgcggtactgcaccagg

SEQ ID NO: 754 - DNA, 20 bp, Artificial sequence
  Synthetic oligonucleotide
gctctggccgagcatggcct

SEQ ID NO: 755 - DNA, 20 bp, Artificial sequence
  Synthetic oligonucleotide
cctcggtgctctggccgagc

SEQ ID NO: 756 - DNA, 20 bp, Artificial sequence
  Synthetic oligonucleotide
gaggcgaggcgcacccgcag

SEQ ID NO: 757 - DNA, 20 bp, Artificial sequence
  Synthetic oligonucleotide
ccgcttacgcagcttgcgca

SEQ ID NO: 758 - DNA, 20 bp, Artificial sequence
  Synthetic oligonucleotide
gaggagccgcttacgcagct

SEQ ID NO: 759 - DNA, 20 bp, Artificial sequence
  Synthetic oligonucleotide
atcgcggaggagccgcttac

SEQ ID NO: 760 - DNA, 20 bp, Artificial sequence
  Synthetic oligonucleotide
catcggcatcgcggaggagc

SEQ ID NO: 761 - DNA, 20 bp, Artificial sequence
  Synthetic oligonucleotide
gcaggtcatcggcatcgcgg

SEQ ID NO: 762 - DNA, 20 bp, Artificial sequence
  Synthetic oligonucleotide
cccggcctggtacactgcca

SEQ ID NO: 763 - DNA, 20 bp, Artificial sequence
  Synthetic oligonucleotide
cgcgggccccggcctggtac

SEQ ID NO: 764 - DNA, 20 bp, Artificial sequence
  Synthetic oligonucleotide
gcacgcggccctgttccacc

SEQ ID NO: 765 - DNA, 20 bp, Artificial sequence
  Synthetic oligonucleotide
cggcccgcacgcggccctgt

SEQ ID NO: 766 - DNA, 20 bp, Artificial sequence
  Synthetic oligonucleotide
acagtggcggcccgcacgcg

SEQ ID NO: 767 - DNA, 20 bp, Artificial sequence
  Synthetic oligonucleotide
gagcccacagtggcggcccg

SEQ ID NO: 768 - DNA, 20 bp, Artificial sequence
  Synthetic oligonucleotide
cgctcctgtagcggctggcc

SEQ ID NO: 769 - DNA, 20 bp, Artificial sequence
  Synthetic oligonucleotide
gcgcgcagccgctcgcccca

SEQ ID NO: 770 - DNA, 20 bp, Artificial sequence
  Synthetic oligonucleotide
cgcgggtccggctgcccatc

SEQ ID NO: 771 - DNA, 20 bp, Artificial sequence
  Synthetic oligonucleotide
ggcggtcgcgggtccggctg

SEQ ID NO: 772 - DNA, 20 bp, Artificial sequence
  Synthetic oligonucleotide
ttggcgcgcacctccgccac

SEQ ID NO: 773 - DNA, 20 bp, Artificial sequence
  Synthetic oligonucleotide
ctccagcttggcgcgcacct

SEQ ID NO: 774 - DNA, 20 bp, Artificial sequence
  Synthetic oligonucleotide
aaccagctcttgaggcgggc

SEQ ID NO: 775 - DNA, 20 bp, Artificial sequence
  Synthetic oligonucleotide
ggctcgaaccagctcttgag

SEQ ID NO: 776 - DNA, 20 bp, Artificial sequence
  Synthetic oligonucleotide
taaactagggtccaccccag

SEQ ID NO: 777 - DNA, 20 bp, Artificial sequence
  Synthetic oligonucleotide
gcgcttctcaccggctcctg

SEQ ID NO: 778 - DNA, 20 bp, Artificial sequence
  Synthetic oligonucleotide
cccgactgcgcttctcaccg

SEQ ID NO: 779 - DNA, 20 bp, Artificial sequence
  Synthetic oligonucleotide
cgtgcccccgactgcgcttc

SEQ ID NO: 780 - DNA, 20 bp, Artificial sequence
  Synthetic oligonucleotide
gctcatccccgtgcccccga

SEQ ID NO: 781 - DNA, 20 bp, Artificial sequence
  Synthetic oligonucleotide
tttaccaagccgcccccaac

SEQ ID NO: 782 - DNA, 20 bp, Artificial sequence
  Synthetic oligonucleotide
agcacatttaccaagccgcc

SEQ ID NO: 783 - DNA, 20 bp, Artificial sequence
  Synthetic oligonucleotide
ccttccaagccttgttgcat

SEQ ID NO: 784 - DNA, 20 bp, Artificial sequence
  Synthetic oligonucleotide
cgagtagctctcctgagact

SEQ ID NO: 785 - DNA, 20 bp, Artificial sequence
  Synthetic oligonucleotide
cgaccccgagtagctctcct

SEQ ID NO: 786 - DNA, 20 bp, Artificial sequence
  Synthetic oligonucleotide
caagcccgaccccgagtagc

SEQ ID NO: 787 - DNA, 20 bp, Artificial sequence
  Synthetic oligonucleotide
gctatggcttacatcccagt

SEQ ID NO: 788 - DNA, 20 bp, Artificial sequence
  Synthetic oligonucleotide
taaatgatagtgacaactcg

SEQ ID NO: 789 - DNA, 20 bp, Artificial sequence
  Synthetic oligonucleotide
agctaccgtgtcgctgcccc

SEQ ID NO: 790 - DNA, 20 bp, Artificial sequence
  Synthetic oligonucleotide
acggctagctaccgtgtcgc

SEQ ID NO: 791 - DNA, 20 bp, Artificial sequence
  Synthetic oligonucleotide
aagttctccaatcgacggct

SEQ ID NO: 792 - DNA, 20 bp, Artificial sequence
  Synthetic oligonucleotide
gcgccgtgttccatttatga

SEQ ID NO: 793 - DNA, 20 bp, Artificial sequence
  Synthetic oligonucleotide
gccggttccatctcagtccc

SEQ ID NO: 794 - DNA, 20 bp, Artificial sequence
  Synthetic oligonucleotide
ccccaccgccggttccatct

SEQ ID NO: 795 - DNA, 20 bp, Artificial sequence
  Synthetic oligonucleotide
tccccaggtcggcctccata

SEQ ID NO: 796 - DNA, 20 bp, Artificial sequence
  Synthetic oligonucleotide
accgccagtgaggactcctc

SEQ ID NO: 797 - DNA, 20 bp, Artificial sequence
  Synthetic oligonucleotide
agaaactgtcaatcaaccgc

SEQ ID NO: 798 - DNA, 20 bp, Artificial sequence
  Synthetic oligonucleotide
tcaaatcgctgttcagagcc

SEQ ID NO: 799 - DNA, 20 bp, Artificial sequence
  Synthetic oligonucleotide
tgccccgtgtctggtattca

SEQ ID NO: 800 - DNA, 20 bp, Artificial sequence
  Synthetic oligonucleotide
gcatgtattgagtgtccttg

SEQ ID NO: 801 - DNA, 20 bp, Artificial sequence
  Synthetic oligonucleotide
gagtcggtttaatcacttgg

SEQ ID NO: 802 - DNA, 20 bp, Artificial sequence
  Synthetic oligonucleotide
ccccgtccaggcatctagta

SEQ ID NO: 803 - DNA, 20 bp, Artificial sequence
  Synthetic oligonucleotide
gtccttctgaccccgtccag

SEQ ID NO: 804 - DNA, 20 bp, Artificial sequence
  Synthetic oligonucleotide
gtgtggaacaagttcaaggt

SEQ ID NO: 805 - DNA, 20 bp, Artificial sequence
  Synthetic oligonucleotide
tatagccgcccaccaggagg

SEQ ID NO: 806 - DNA, 20 bp, Artificial sequence
  Synthetic oligonucleotide
gggaggtatagccgcccacc

SEQ ID NO: 807 - DNA, 20 bp, Artificial sequence
  Synthetic oligonucleotide
ccaggacgagtgtgagagac

SEQ ID NO: 808 - DNA, 20 bp, Artificial sequence
  Synthetic oligonucleotide
ttatagggctccccctgtcc

SEQ ID NO: 809 - DNA, 20 bp, Artificial sequence
  Synthetic oligonucleotide
gtccaattatagggctcccc

SEQ ID NO: 810 - DNA, 20 bp, Artificial sequence
  Synthetic oligonucleotide
cagacttgtccaattatagg

SEQ ID NO: 811 - DNA, 20 bp, Artificial sequence
  Synthetic oligonucleotide
atgtgaccagcaacgcagcc

SEQ ID NO: 812 - DNA, 20 bp, Artificial sequence
  Synthetic oligonucleotide
accgcttgctccaccttggc

SEQ ID NO: 813 - DNA, 20 bp, Artificial sequence
  Synthetic oligonucleotide
tcggtctgctggcgcagctc

SEQ ID NO: 814 - DNA, 20 bp, Artificial sequence
  Synthetic oligonucleotide
tgccactcggtctgctggcg

SEQ ID NO: 815 - DNA, 20 bp, Artificial sequence
  Synthetic oligonucleotide
aaaagcgacccagtgccagt

SEQ ID NO: 816 - DNA, 20 bp, Artificial sequence
  Synthetic oligonucleotide
taatcccaaaagcgacccag

SEQ ID NO: 817 - DNA, 20 bp, Artificial sequence
  Synthetic oligonucleotide
acccagcgcaggtaatccca

SEQ ID NO: 818 - DNA, 20 bp, Artificial sequence
  Synthetic oligonucleotide
gttccgatttgtaggccttc

SEQ ID NO: 819 - DNA, 20 bp, Artificial sequence
  Synthetic oligonucleotide
cctccagttccgatttgtag

SEQ ID NO: 820 - DNA, 20 bp, Artificial sequence
  Synthetic oligonucleotide
agttgttcctccagttccga

SEQ ID NO: 821 - DNA, 20 bp, Artificial sequence
  Synthetic oligonucleotide
gctccttggacagccgtgcc

SEQ ID NO: 822 - DNA, 20 bp, Artificial sequence
  Synthetic oligonucleotide
gcaccaggcggccgcacacg

SEQ ID NO: 823 - DNA, 20 bp, Artificial sequence
  Synthetic oligonucleotide
cggtactgcaccaggcggcc

SEQ ID NO: 824 - DNA, 20 bp, Artificial sequence
  Synthetic oligonucleotide
tcgccgcggtactgcaccag

SEQ ID NO: 825 - DNA, 20 bp, Artificial sequence
  Synthetic oligonucleotide
tgctctggccgagcatggcc

SEQ ID NO: 826 - DNA, 20 bp, Artificial sequence
  Synthetic oligonucleotide
tcctcggtgctctggccgag

SEQ ID NO: 827 - DNA, 20 bp, Artificial sequence
  Synthetic oligonucleotide
ggaggcgaggcgcacccgca

SEQ ID NO: 828 - DNA, 20 bp, Artificial sequence
  Synthetic oligonucleotide
acgcagcttgcgcaggtggg

SEQ ID NO: 829 - DNA, 20 bp, Artificial sequence
  Synthetic oligonucleotide
gccgcttacgcagcttgcgc

SEQ ID NO: 830 - DNA, 20 bp, Artificial sequence
  Synthetic oligonucleotide
ggaggagccgcttacgcagc

SEQ ID NO: 831 - DNA, 20 bp, Artificial sequence
  Synthetic oligonucleotide
catcgcggaggagccgctta

SEQ ID NO: 832 - DNA, 20 bp, Artificial sequence
  Synthetic oligonucleotide
tcatcggcatcgcggaggag

SEQ ID NO: 833 - DNA, 20 bp, Artificial sequence
  Synthetic oligonucleotide
tgcaggtcatcggcatcgcg

SEQ ID NO: 834 - DNA, 20 bp, Artificial sequence
  Synthetic oligonucleotide
tcgcgggccccggcctggta

SEQ ID NO: 835 - DNA, 20 bp, Artificial sequence
  Synthetic oligonucleotide
cgcacgcggccctgttccac

SEQ ID NO: 836 - DNA, 20 bp, Artificial sequence
  Synthetic oligonucleotide
ggcggcccgcacgcggccct

SEQ ID NO: 837 - DNA, 20 bp, Artificial sequence
  Synthetic oligonucleotide
cacagtggcggcccgcacgc

SEQ ID NO: 838 - DNA, 20 bp, Artificial sequence
  Synthetic oligonucleotide
ctgtagcggctggccggcca

SEQ ID NO: 839 - DNA, 20 bp, Artificial sequence
  Synthetic oligonucleotide
ccgctcctgtagcggctggc

SEQ ID NO: 840 - DNA, 20 bp, Artificial sequence
  Synthetic oligonucleotide
atctcctccatccgcgcgcg

SEQ ID NO: 841 - DNA, 20 bp, Artificial sequence
  Synthetic oligonucleotide
tcgcgggtccggctgcccat

SEQ ID NO: 842 - DNA, 20 bp, Artificial sequence
  Synthetic oligonucleotide
aggcggtcgcgggtccggct

SEQ ID NO: 843 - DNA, 20 bp, Artificial sequence
  Synthetic oligonucleotide
cttggcgcgcacctccgcca

SEQ ID NO: 844 - DNA, 20 bp, Artificial sequence
  Synthetic oligonucleotide
cctccagcttggcgcgcacc

SEQ ID NO: 845 - DNA, 20 bp, Artificial sequence
  Synthetic oligonucleotide
gaaccagctcttgaggcggg

SEQ ID NO: 846 - DNA, 20 bp, Artificial sequence
  Synthetic oligonucleotide
gggctcgaaccagctcttga

SEQ ID NO: 847 - DNA, 20 bp, Artificial sequence
  Synthetic oligonucleotide
catggctgcaggcttcggcg

SEQ ID NO: 848 - DNA, 20 bp, Artificial sequence
  Synthetic oligonucleotide
cccgctgcaggctgcgcgga

SEQ ID NO: 849 - DNA, 20 bp, Artificial sequence
  Synthetic oligonucleotide
ttaaactagggtccacccca

SEQ ID NO: 850 - DNA, 20 bp, Artificial sequence
  Synthetic oligonucleotide
tgcgcttctcaccggctcct

SEQ ID NO: 851 - DNA, 20 bp, Artificial sequence
  Synthetic oligonucleotide
ccccgactgcgcttctcacc

SEQ ID NO: 852 - DNA, 20 bp, Artificial sequence
  Synthetic oligonucleotide
ccgtgcccccgactgcgctt

SEQ ID NO: 853 - DNA, 20 bp, Artificial sequence
  Synthetic oligonucleotide
agctcatccccgtgcccccg

SEQ ID NO: 854 - DNA, 20 bp, Artificial sequence
  Synthetic oligonucleotide
atttaccaagccgcccccaa

SEQ ID NO: 855 - DNA, 20 bp, Artificial sequence
  Synthetic oligonucleotide
cagcacatttaccaagccgc

SEQ ID NO: 856 - DNA, 20 bp, Artificial sequence
  Synthetic oligonucleotide
agccttccaagccttgttgc

SEQ ID NO: 857 - DNA, 20 bp, Artificial sequence
  Synthetic oligonucleotide
ccgagtagctctcctgagac

SEQ ID NO: 858 - DNA, 20 bp, Artificial sequence
  Synthetic oligonucleotide
ccgaccccgagtagctctcc

SEQ ID NO: 859 - DNA, 20 bp, Artificial sequence
  Synthetic oligonucleotide
cccaccttctagcgggtcgg

SEQ ID NO: 860 - DNA, 20 bp, Artificial sequence
  Synthetic oligonucleotide
tcctgctatggcttacatcc

SEQ ID NO: 861 - DNA, 20 bp, Artificial sequence
  Synthetic oligonucleotide
gctccccagttatggagatc

SEQ ID NO: 862 - DNA, 20 bp, Artificial sequence
  Synthetic oligonucleotide
tagctaccgtgtcgctgccc

SEQ ID NO: 863 - DNA, 20 bp, Artificial sequence
  Synthetic oligonucleotide
gacggctagctaccgtgtcg

SEQ ID NO: 864 - DNA, 20 bp, Artificial sequence
  Synthetic oligonucleotide
aaagttctccaatcgacggc

SEQ ID NO: 865 - DNA, 20 bp, Artificial sequence
  Synthetic oligonucleotide
ccaacctcacagttaagcgc

SEQ ID NO: 866 - DNA, 20 bp, Artificial sequence
  Synthetic oligonucleotide
cgccggttccatctcagtcc

SEQ ID NO: 867 - DNA, 20 bp, Artificial sequence
  Synthetic oligonucleotide
tccccaccgccggttccatc

SEQ ID NO: 868 - DNA, 20 bp, Artificial sequence
  Synthetic oligonucleotide
atccccaggtcggcctccat

SEQ ID NO: 869 - DNA, 20 bp, Artificial sequence
  Synthetic oligonucleotide
aaccgccagtgaggactcct

SEQ ID NO: 870 - DNA, 20 bp, Artificial sequence
  Synthetic oligonucleotide
atacctgccaggaatgtgac

SEQ ID NO: 871 - DNA, 20 bp, Artificial sequence
  Synthetic oligonucleotide
atctgcctgcaatgcattag

SEQ ID NO: 872 - DNA, 20 bp, Artificial sequence
  Synthetic oligonucleotide
gctgccccgtgtctggtatt

SEQ ID NO: 873 - DNA, 20 bp, Artificial sequence
  Synthetic oligonucleotide
gcggaaaagcatgtattgag

SEQ ID NO: 874 - DNA, 20 bp, Artificial sequence
  Synthetic oligonucleotide
gggagtcggtttaatcactt

SEQ ID NO: 875 - DNA, 20 bp, Artificial sequence
  Synthetic oligonucleotide
accccgtccaggcatctagt

SEQ ID NO: 876 - DNA, 20 bp, Artificial sequence
  Synthetic oligonucleotide
ggtccttctgaccccgtcca

SEQ ID NO: 877 - DNA, 20 bp, Artificial sequence
  Synthetic oligonucleotide
cgcccaccaggagggtcaag

SEQ ID NO: 878 - DNA, 20 bp, Artificial sequence
  Synthetic oligonucleotide
gtatagccgcccaccaggag

SEQ ID NO: 879 - DNA, 20 bp, Artificial sequence
  Synthetic oligonucleotide
ccccccaagacttagcgaca

SEQ ID NO: 880 - DNA, 20 bp, Artificial sequence
  Synthetic oligonucleotide
tgtcgcacagtgggaggcgg

SEQ ID NO: 881 - DNA, 20 bp, Artificial sequence
  Synthetic oligonucleotide
attatagggctccccctgtc

SEQ ID NO: 882 - DNA, 20 bp, Artificial sequence
  Synthetic oligonucleotide
tgtccaattatagggctccc

SEQ ID NO: 883 - DNA, 20 bp, Artificial sequence
  Synthetic oligonucleotide
gatcccagacttgtccaatt

SEQ ID NO: 884 - DNA, 20 bp, Artificial sequence
  Synthetic oligonucleotide
gcaacgcagcccacagaacc

SEQ ID NO: 885 - DNA, 20 bp, Artificial sequence
  Synthetic oligonucleotide
aatgtgaccagcaacgcagc

SEQ ID NO: 886 - DNA, 20 bp, Artificial sequence
  Synthetic oligonucleotide
caccgcttgctccaccttgg

SEQ ID NO: 887 - DNA, 20 bp, Artificial sequence
  Synthetic oligonucleotide
ctcggtctgctggcgcagct

SEQ ID NO: 888 - DNA, 20 bp, Artificial sequence
  Synthetic oligonucleotide
cgacccagtgccagttccca

SEQ ID NO: 889 - DNA, 20 bp, Artificial sequence
  Synthetic oligonucleotide
ccaaaagcgacccagtgcca

SEQ ID NO: 890 - DNA, 20 bp, Artificial sequence
  Synthetic oligonucleotide
gtaatcccaaaagcgaccca

SEQ ID NO: 891 - DNA, 20 bp, Artificial sequence
  Synthetic oligonucleotide
gcgcaggtaatcccaaaagc

SEQ ID NO: 892 - DNA, 20 bp, Artificial sequence
  Synthetic oligonucleotide
cacccagcgcaggtaatccc

SEQ ID NO: 893 - DNA, 20 bp, Artificial sequence
  Synthetic oligonucleotide
agttccgatttgtaggcctt

SEQ ID NO: 894 - DNA, 20 bp, Artificial sequence
  Synthetic oligonucleotide
tcctccagttccgatttgta

SEQ ID NO: 895 - DNA, 20 bp, Artificial sequence
  Synthetic oligonucleotide
cagttgttcctccagttccg

SEQ ID NO: 896 - DNA, 20 bp, Artificial sequence
  Synthetic oligonucleotide
agctccttggacagccgtgc

SEQ ID NO: 897 - DNA, 20 bp, Artificial sequence
  Synthetic oligonucleotide
tgcaccaggcggccgcacac

SEQ ID NO: 898 - DNA, 20 bp, Artificial sequence
  Synthetic oligonucleotide
ctcgccgcggtactgcacca

SEQ ID NO: 899 - DNA, 20 bp, Artificial sequence
  Synthetic oligonucleotide
gtgctctggccgagcatggc

SEQ ID NO: 900 - DNA, 20 bp, Artificial sequence
  Synthetic oligonucleotide
ctcctcggtgctctggccga

SEQ ID NO: 901 - DNA, 20 bp, Artificial sequence
  Synthetic oligonucleotide
gggaggcgaggcgcacccgc

SEQ ID NO: 902 - DNA, 20 bp, Artificial sequence
  Synthetic oligonucleotide
tacgcagcttgcgcaggtgg

SEQ ID NO: 903 - DNA, 20 bp, Artificial sequence
  Synthetic oligonucleotide
agccgcttacgcagcttgcg

SEQ ID NO: 904 - DNA, 20 bp, Artificial sequence
  Synthetic oligonucleotide
cggaggagccgcttacgcag

SEQ ID NO: 905 - DNA, 20 bp, Artificial sequence
  Synthetic oligonucleotide
gcatcgcggaggagccgctt

SEQ ID NO: 906 - DNA, 20 bp, Artificial sequence
  Synthetic oligonucleotide
gtcatcggcatcgcggagga

SEQ ID NO: 907 - DNA, 20 bp, Artificial sequence
  Synthetic oligonucleotide
ggccccggcctggtacactg

SEQ ID NO: 908 - DNA, 20 bp, Artificial sequence
  Synthetic oligonucleotide
cgctgaggccgcgctcggcg

SEQ ID NO: 909 - DNA, 20 bp, Artificial sequence
  Synthetic oligonucleotide
ccgcacgcggccctgttcca

SEQ ID NO: 910 - DNA, 20 bp, Artificial sequence
  Synthetic oligonucleotide
tggcggcccgcacgcggccc

SEQ ID NO: 911 - DNA, 20 bp, Artificial sequence
  Synthetic oligonucleotide
ccacagtggcggcccgcacg

SEQ ID NO: 912 - DNA, 20 bp, Artificial sequence
  Synthetic oligonucleotide
cctgtagcggctggccggcc

SEQ ID NO: 913 - DNA, 20 bp, Artificial sequence
  Synthetic oligonucleotide
ggcccgctcctgtagcggct

SEQ ID NO: 914 - DNA, 20 bp, Artificial sequence
  Synthetic oligonucleotide
catctcctccatccgcgcgc

SEQ ID NO: 915 - DNA, 20 bp, Artificial sequence
  Synthetic oligonucleotide
gtcgcgggtccggctgccca

SEQ ID NO: 916 - DNA, 20 bp, Artificial sequence
  Synthetic oligonucleotide
caggcggtcgcgggtccggc

SEQ ID NO: 917 - DNA, 20 bp, Artificial sequence
  Synthetic oligonucleotide
gcttggcgcgcacctccgcc

SEQ ID NO: 918 - DNA, 20 bp, Artificial sequence
  Synthetic oligonucleotide
tcctccagcttggcgcgcac

SEQ ID NO: 919 - DNA, 20 bp, Artificial sequence
  Synthetic oligonucleotide
gcatggctgcaggcttcggc

SEQ ID NO: 920 - DNA, 20 bp, Artificial sequence
  Synthetic oligonucleotide
tcccgctgcaggctgcgcgg

SEQ ID NO: 921 - DNA, 20 bp, Artificial sequence
  Synthetic oligonucleotide
attaaactagggtccacccc

SEQ ID NO: 922 - DNA, 20 bp, Artificial sequence
  Synthetic oligonucleotide
actgcgcttctcaccggctc

SEQ ID NO: 923 - DNA, 20 bp, Artificial sequence
  Synthetic oligonucleotide
cccccgactgcgcttctcac

SEQ ID NO: 924 - DNA, 20 bp, Artificial sequence
  Synthetic oligonucleotide
cccgtgcccccgactgcgct

SEQ ID NO: 925 - DNA, 20 bp, Artificial sequence
  Synthetic oligonucleotide
ctatttaactccctcctggt

SEQ ID NO: 926 - DNA, 20 bp, Artificial sequence
  Synthetic oligonucleotide
catttaccaagccgccccca

SEQ ID NO: 927 - DNA, 20 bp, Artificial sequence
  Synthetic oligonucleotide
ccagcacatttaccaagccg

SEQ ID NO: 928 - DNA, 20 bp, Artificial sequence
  Synthetic oligonucleotide
tagccttccaagccttgttg

SEQ ID NO: 929 - DNA, 20 bp, Artificial sequence
  Synthetic oligonucleotide
cccgagtagctctcctgaga

SEQ ID NO: 930 - DNA, 20 bp, Artificial sequence
  Synthetic oligonucleotide
cccgaccccgagtagctctc

SEQ ID NO: 931 - DNA, 20 bp, Artificial sequence
  Synthetic oligonucleotide
ccccaccttctagcgggtcg

SEQ ID NO: 932 - DNA, 20 bp, Artificial sequence
  Synthetic oligonucleotide
agtcctgctatggcttacat

SEQ ID NO: 933 - DNA, 20 bp, Artificial sequence
  Synthetic oligonucleotide
ctagctaccgtgtcgctgcc

SEQ ID NO: 934 - DNA, 20 bp, Artificial sequence
  Synthetic oligonucleotide
cgacggctagctaccgtgtc

SEQ ID NO: 935 - DNA, 20 bp, Artificial sequence
  Synthetic oligonucleotide
tttaaagttctccaatcgac

SEQ ID NO: 936 - DNA, 20 bp, Artificial sequence
  Synthetic oligonucleotide
agtcccagtctcgcattcct

SEQ ID NO: 937 - DNA, 20 bp, Artificial sequence
  Synthetic oligonucleotide
ccgccggttccatctcagtc

SEQ ID NO: 938 - DNA, 20 bp, Artificial sequence
  Synthetic oligonucleotide
cggcctccatagaaaattcc

SEQ ID NO: 939 - DNA, 20 bp, Artificial sequence
  Synthetic oligonucleotide
tcaccccaggttagccttcc

SEQ ID NO: 940 - DNA, 20 bp, Artificial sequence
  Synthetic oligonucleotide
caaccgccagtgaggactcc

SEQ ID NO: 941 - DNA, 20 bp, Artificial sequence
  Synthetic oligonucleotide
gaaccgagcaagccccgccc

SEQ ID NO: 942 - DNA, 20 bp, Artificial sequence
  Synthetic oligonucleotide
gtctggtattcactatctgc

SEQ ID NO: 943 - DNA, 20 bp, Artificial sequence
  Synthetic oligonucleotide
agctgccccgtgtctggtat

SEQ ID NO: 944 - DNA, 20 bp, Artificial sequence
  Synthetic oligonucleotide
gcccagcggaaaagcatgta

SEQ ID NO: 945 - DNA, 20 bp, Artificial sequence
  Synthetic oligonucleotide
ccaggcatctagtacctagg

SEQ ID NO: 946 - DNA, 20 bp, Artificial sequence
  Synthetic oligonucleotide
gaccccgtccaggcatctag

SEQ ID NO: 947 - DNA, 20 bp, Artificial sequence
  Synthetic oligonucleotide
gggtccttctgaccccgtcc

SEQ ID NO: 948 - DNA, 20 bp, Artificial sequence
  Synthetic oligonucleotide
ccgcccaccaggagggtcaa

SEQ ID NO: 949 - DNA, 20 bp, Artificial sequence
  Synthetic oligonucleotide
ggtatagccgcccaccagga

SEQ ID NO: 950 - DNA, 20 bp, Artificial sequence
  Synthetic oligonucleotide
gccccccaagacttagcgac

SEQ ID NO: 951 - DNA, 20 bp, Artificial sequence
  Synthetic oligonucleotide
gtgtcgcacagtgggaggcg

SEQ ID NO: 952 - DNA, 20 bp, Artificial sequence
  Synthetic oligonucleotide
aattatagggctccccctgt

SEQ ID NO: 953 - DNA, 20 bp, Artificial sequence
  Synthetic oligonucleotide
cttgtccaattatagggctc

SEQ ID NO: 954 - DNA, 20 bp, Artificial sequence
  Synthetic oligonucleotide
ggatcccagacttgtccaat

SEQ ID NO: 955 - DNA, 20 bp, Artificial sequence
  Synthetic oligonucleotide
gaccagcaacgcagcccaca

SEQ ID NO: 956 - DNA, 20 bp, Artificial sequence
  Synthetic oligonucleotide
gaatgtgaccagcaacgcag

SEQ ID NO: 957 - DNA, 20 bp, Artificial sequence
  Synthetic oligonucleotide
gtctccaccgcttgctccac

SEQ ID NO: 958 - DNA, 20 bp, Artificial sequence
  Synthetic oligonucleotide
actcggtctgctggcgcagc

SEQ ID NO: 959 - DNA, 20 bp, Artificial sequence
  Synthetic oligonucleotide
gcgacccagtgccagttccc

SEQ ID NO: 960 - DNA, 20 bp, Artificial sequence
  Synthetic oligonucleotide
ggtaatcccaaaagcgaccc

SEQ ID NO: 961 - DNA, 20 bp, Artificial sequence
  Synthetic oligonucleotide
agcgcaggtaatcccaaaag

SEQ ID NO: 962 - DNA, 20 bp, Artificial sequence
  Synthetic oligonucleotide
ttcctccagttccgatttgt

SEQ ID NO: 963 - DNA, 20 bp, Artificial sequence
  Synthetic oligonucleotide
gggtcagttgttcctccagt

SEQ ID NO: 964 - DNA, 20 bp, Artificial sequence
  Synthetic oligonucleotide
tccatgtccgcgcccagccg

SEQ ID NO: 965 - DNA, 20 bp, Artificial sequence
  Synthetic oligonucleotide
actgcaccaggcggccgcac

SEQ ID NO: 966 - DNA, 20 bp, Artificial sequence
  Synthetic oligonucleotide
cgcggtactgcaccaggcgg

SEQ ID NO: 967 - DNA, 20 bp, Artificial sequence
  Synthetic oligonucleotide
cctcgccgcggtactgcacc

SEQ ID NO: 968 - DNA, 20 bp, Artificial sequence
  Synthetic oligonucleotide
cggtgctctggccgagcatg

SEQ ID NO: 969 - DNA, 20 bp, Artificial sequence
  Synthetic oligonucleotide
cgcacccgcagctcctcggt

SEQ ID NO: 970 - DNA, 20 bp, Artificial sequence
  Synthetic oligonucleotide
tgggaggcgaggcgcacccg

SEQ ID NO: 971 - DNA, 20 bp, Artificial sequence
  Synthetic oligonucleotide
ttacgcagcttgcgcaggtg

SEQ ID NO: 972 - DNA, 20 bp, Artificial sequence
  Synthetic oligonucleotide
gcggaggagccgcttacgca

SEQ ID NO: 973 - DNA, 20 bp, Artificial sequence
  Synthetic oligonucleotide
ggcatcgcggaggagccgct

SEQ ID NO: 974 - DNA, 20 bp, Artificial sequence
  Synthetic oligonucleotide
ggtcatcggcatcgcggagg

SEQ ID NO: 975 - DNA, 20 bp, Artificial sequence
  Synthetic oligonucleotide
tctgcaggtcatcggcatcg

SEQ ID NO: 976 - DNA, 20 bp, Artificial sequence
  Synthetic oligonucleotide
gggccccggcctggtacact

SEQ ID NO: 977 - DNA, 20 bp, Artificial sequence
  Synthetic oligonucleotide
gcgctgaggccgcgctcggc

SEQ ID NO: 978 - DNA, 20 bp, Artificial sequence
  Synthetic oligonucleotide
cccgcacgcggccctgttcc

SEQ ID NO: 979 - DNA, 20 bp, Artificial sequence
  Synthetic oligonucleotide
gtggcggcccgcacgcggcc

SEQ ID NO: 980 - DNA, 20 bp, Artificial sequence
  Synthetic oligonucleotide
cccacagtggcggcccgcac

SEQ ID NO: 981 - DNA, 20 bp, Artificial sequence
  Synthetic oligonucleotide
tcctgtagcggctggccggc

SEQ ID NO: 982 - DNA, 20 bp, Artificial sequence
  Synthetic oligonucleotide
gggcccgctcctgtagcggc

SEQ ID NO: 983 - DNA, 20 bp, Artificial sequence
  Synthetic oligonucleotide
ccatctcctccatccgcgcg

SEQ ID NO: 984 - DNA, 20 bp, Artificial sequence
  Synthetic oligonucleotide
ggtcgcgggtccggctgccc

SEQ ID NO: 985 - DNA, 20 bp, Artificial sequence
  Synthetic oligonucleotide
ccaggcggtcgcgggtccgg

SEQ ID NO: 986 - DNA, 20 bp, Artificial sequence
  Synthetic oligonucleotide
agcttggcgcgcacctccgc

SEQ ID NO: 987 - DNA, 20 bp, Artificial sequence
  Synthetic oligonucleotide
ctcttgaggcgggcctggaa

SEQ ID NO: 988 - DNA, 20 bp, Artificial sequence
  Synthetic oligonucleotide
tcgaaccagctcttgaggcg

SEQ ID NO: 989 - DNA, 20 bp, Artificial sequence
  Synthetic oligonucleotide
tcagtgattgtcgctgggca

SEQ ID NO: 990 - DNA, 20 bp, Artificial sequence
  Synthetic oligonucleotide
gtctcccgctgcaggctgcg

SEQ ID NO: 991 - DNA, 20 bp, Artificial sequence
  Synthetic oligonucleotide
gactgcgcttctcaccggct

SEQ ID NO: 992 - DNA, 20 bp, Artificial sequence
  Synthetic oligonucleotide
gcccccgactgcgcttctca

SEQ ID NO: 993 - DNA, 20 bp, Artificial sequence
  Synthetic oligonucleotide
tccccgtgcccccgactgcg

SEQ ID NO: 994 - DNA, 20 bp, Artificial sequence
  Synthetic oligonucleotide
aagccgcccccaacccattc

SEQ ID NO: 995 - DNA, 20 bp, Artificial sequence
  Synthetic oligonucleotide
acatttaccaagccgccccc

SEQ ID NO: 996 - DNA, 20 bp, Artificial sequence
  Synthetic oligonucleotide
atctgcaacagcctaatccc

SEQ ID NO: 997 - DNA, 20 bp, Artificial sequence
  Synthetic oligonucleotide
gttagccttccaagccttgt

SEQ ID NO: 998 - DNA, 20 bp, Artificial sequence
  Synthetic oligonucleotide
ccccgagtagctctcctgag

SEQ ID NO: 999 - DNA, 20 bp, Artificial sequence
  Synthetic oligonucleotide
gcccgaccccgagtagctct

SEQ ID NO: 1000 - DNA, 20 bp, Artificial sequence
  Synthetic oligonucleotide
accccaccttctagcgggtc

SEQ ID NO: 1001 - DNA, 20 bp, Artificial sequence
  Synthetic oligonucleotide
ggagtcctgctatggcttac

SEQ ID NO: 1002 - DNA, 20 bp, Artificial sequence
  Synthetic oligonucleotide
taccgtgtcgctgcccctgg

SEQ ID NO: 1003 - DNA, 20 bp, Artificial sequence
  Synthetic oligonucleotide
gctagctaccgtgtcgctgc

SEQ ID NO: 1004 - DNA, 20 bp, Artificial sequence
  Synthetic oligonucleotide
tcgacggctagctaccgtgt

SEQ ID NO: 1005 - DNA, 20 bp, Artificial sequence
  Synthetic oligonucleotide
cgtgttccatttatgagcta

SEQ ID NO: 1006 - DNA, 20 bp, Artificial sequence
  Synthetic oligonucleotide
cagtcccagtctcgcattcc

SEQ ID NO: 1007 - DNA, 20 bp, Artificial sequence
  Synthetic oligonucleotide
accgccggttccatctcagt

SEQ ID NO: 1008 - DNA, 20 bp, Artificial sequence
  Synthetic oligonucleotide
aggtcggcctccatagaaaa

SEQ ID NO: 1009 - DNA, 20 bp, Artificial sequence
  Synthetic oligonucleotide
cggcctcaccccaggttagc

SEQ ID NO: 1010 - DNA, 20 bp, Artificial sequence
  Synthetic oligonucleotide
aatcaaccgccagtgaggac

SEQ ID NO: 1011 - DNA, 20 bp, Artificial sequence
  Synthetic oligonucleotide
ggaaccgagcaagccccgcc

SEQ ID NO: 1012 - DNA, 20 bp, Artificial sequence
  Synthetic oligonucleotide
ccgtgtctggtattcactat

SEQ ID NO: 1013 - DNA, 20 bp, Artificial sequence
  Synthetic oligonucleotide
gatcacagctgccccgtgtc

SEQ ID NO: 1014 - DNA, 20 bp, Artificial sequence
  Synthetic oligonucleotide
gcgcccagcggaaaagcatg

SEQ ID NO: 1015 - DNA, 20 bp, Artificial sequence
  Synthetic oligonucleotide
gtccaggcatctagtaccta

SEQ ID NO: 1016 - DNA, 20 bp, Artificial sequence
  Synthetic oligonucleotide
tgaccccgtccaggcatcta

SEQ ID NO: 1017 - DNA, 20 bp, Artificial sequence
  Synthetic oligonucleotide
cagggtccttctgaccccgt

SEQ ID NO: 1018 - DNA, 20 bp, Artificial sequence
  Synthetic oligonucleotide
agccgcccaccaggagggtc

SEQ ID NO: 1019 - DNA, 20 bp, Artificial sequence
  Synthetic oligonucleotide
aggtatagccgcccaccagg

SEQ ID NO: 1020 - DNA, 20 bp, Artificial sequence
  Synthetic oligonucleotide
ggccccccaagacttagcga

SEQ ID NO: 1021 - DNA, 20 bp, Artificial sequence
  Synthetic oligonucleotide
gccctgcggccgagagggcg

SEQ ID NO: 1022 - DNA, 20 bp, Artificial sequence
  Synthetic oligonucleotide
caattatagggctccccctg

SEQ ID NO: 1023 - DNA, 20 bp, Artificial sequence
  Synthetic oligonucleotide
acttgtccaattatagggct

SEQ ID NO: 1024 - DNA, 20 bp, Artificial sequence
  Synthetic oligonucleotide
tgagtaggactcaaggatcc

SEQ ID NO: 1025 - DNA, 20 bp, Artificial sequence
  Synthetic oligonucleotide
gtctgctggcgcagctcggg

SEQ ID NO: 1026 - DNA, 20 bp, Artificial sequence
  Synthetic oligonucleotide
cactcggtctgctggcgcag

SEQ ID NO: 1027 - DNA, 20 bp, Artificial sequence
  Synthetic oligonucleotide
agcgacccagtgccagttcc

SEQ ID NO: 1028 - DNA, 20 bp, Artificial sequence
  Synthetic oligonucleotide
tcccaaaagcgacccagtgc

SEQ ID NO: 1029 - DNA, 20 bp, Artificial sequence
  Synthetic oligonucleotide
cagcgcaggtaatcccaaaa

SEQ ID NO: 1030 - DNA, 20 bp, Artificial sequence
  Synthetic oligonucleotide
tgcacccagcgcaggtaatc

SEQ ID NO: 1031 - DNA, 20 bp, Artificial sequence
  Synthetic oligonucleotide
ccgatttgtaggccttcaac

SEQ ID NO: 1032 - DNA, 20 bp, Artificial sequence
  Synthetic oligonucleotide
ccagttccgatttgtaggcc

SEQ ID NO: 1033 - DNA, 20 bp, Artificial sequence
  Synthetic oligonucleotide
gttcctccagttccgatttg

SEQ ID NO: 1034 - DNA, 20 bp, Artificial sequence
  Synthetic oligonucleotide
cttggacagccgtgcccgcg

SEQ ID NO: 1035 - DNA, 20 bp, Artificial sequence
  Synthetic oligonucleotide
tcctccatgtccgcgcccag

SEQ ID NO: 1036 - DNA, 20 bp, Artificial sequence
  Synthetic oligonucleotide
tactgcaccaggcggccgca

SEQ ID NO: 1037 - DNA, 20 bp, Artificial sequence
  Synthetic oligonucleotide
ccgcggtactgcaccaggcg

SEQ ID NO: 1038 - DNA, 20 bp, Artificial sequence
  Synthetic oligonucleotide
acctcgccgcggtactgcac

SEQ ID NO: 1039 - DNA, 20 bp, Artificial sequence
  Synthetic oligonucleotide
tcggtgctctggccgagcat

SEQ ID NO: 1040 - DNA, 20 bp, Artificial sequence
  Synthetic oligonucleotide
gcgaggcgcacccgcagctc

SEQ ID NO: 1041 - DNA, 20 bp, Artificial sequence
  Synthetic oligonucleotide
ttgcgcaggtgggaggcgag

SEQ ID NO: 1042 - DNA, 20 bp, Artificial sequence
  Synthetic oligonucleotide
cttacgcagcttgcgcaggt

SEQ ID NO: 1043 - DNA, 20 bp, Artificial sequence
  Synthetic oligonucleotide
ggagccgcttacgcagcttg

SEQ ID NO: 1044 - DNA, 20 bp, Artificial sequence
  Synthetic oligonucleotide
cgcggaggagccgcttacgc

SEQ ID NO: 1045 - DNA, 20 bp, Artificial sequence
  Synthetic oligonucleotide
tcggcatcgcggaggagccg

SEQ ID NO: 1046 - DNA, 20 bp, Artificial sequence
  Synthetic oligonucleotide
aggtcatcggcatcgcggag

SEQ ID NO: 1047 - DNA, 20 bp, Artificial sequence
  Synthetic oligonucleotide
cggcctggtacactgccagg

SEQ ID NO: 1048 - DNA, 20 bp, Artificial sequence
  Synthetic oligonucleotide
cgggccccggcctggtacac

SEQ ID NO: 1049 - DNA, 20 bp, Artificial sequence
  Synthetic oligonucleotide
acgcggccctgttccaccag

SEQ ID NO: 1050 - DNA, 20 bp, Artificial sequence
  Synthetic oligonucleotide
gcccgcacgcggccctgttc

SEQ ID NO: 1051 - DNA, 20 bp, Artificial sequence
  Synthetic oligonucleotide
agtggcggcccgcacgcggc

SEQ ID NO: 1052 - DNA, 20 bp, Artificial sequence
  Synthetic oligonucleotide
ctcctgtagcggctggccgg

SEQ ID NO: 1053 - DNA, 20 bp, Artificial sequence
  Synthetic oligonucleotide
tgggcccgctcctgtagcgg

SEQ ID NO: 1054 - DNA, 20 bp, Artificial sequence
  Synthetic oligonucleotide
cgggtccggctgcccatctc

SEQ ID NO: 1055 - DNA, 20 bp, Artificial sequence
  Synthetic oligonucleotide
cggtcgcgggtccggctgcc

SEQ ID NO: 1056 - DNA, 20 bp, Artificial sequence
  Synthetic oligonucleotide
tccaggcggtcgcgggtccg

SEQ ID NO: 1057 - DNA, 20 bp, Artificial sequence
  Synthetic oligonucleotide
cagcttggcgcgcacctccg

SEQ ID NO: 1058 - DNA, 20 bp, Artificial sequence
  Synthetic oligonucleotide
gctcttgaggcgggcctgga

SEQ ID NO: 1059 - DNA, 20 bp, Artificial sequence
  Synthetic oligonucleotide
ctcgaaccagctcttgaggc

SEQ ID NO: 1060 - DNA, 20 bp, Artificial sequence
  Synthetic oligonucleotide
ttcagtgattgtcgctgggc

SEQ ID NO: 1061 - DNA, 20 bp, Artificial sequence
  Synthetic oligonucleotide
tcgcatggctgcaggcttcg

SEQ ID NO: 1062 - DNA, 20 bp, Artificial sequence
  Synthetic oligonucleotide
ggtccaccccaggaggacgg

SEQ ID NO: 1063 - DNA, 20 bp, Artificial sequence
  Synthetic oligonucleotide
cgtgaaacttggtgaatctt

SEQ ID NO: 1064 - DNA, 20 bp, Artificial sequence
  Synthetic oligonucleotide
cgactgcgcttctcaccggc

SEQ ID NO: 1065 - DNA, 20 bp, Artificial sequence
  Synthetic oligonucleotide
tgcccccgactgcgcttctc

SEQ ID NO: 1066 - DNA, 20 bp, Artificial sequence
  Synthetic oligonucleotide
atccccgtgcccccgactgc

SEQ ID NO: 1067 - DNA, 20 bp, Artificial sequence
  Synthetic oligonucleotide
caagccgcccccaacccatt

SEQ ID NO: 1068 - DNA, 20 bp, Artificial sequence
  Synthetic oligonucleotide
cacatttaccaagccgcccc

SEQ ID NO: 1069 - DNA, 20 bp, Artificial sequence
  Synthetic oligonucleotide
caagccttgttgcattatct

SEQ ID NO: 1070 - DNA, 20 bp, Artificial sequence
  Synthetic oligonucleotide
ggttagccttccaagccttg

SEQ ID NO: 1071 - DNA, 20 bp, Artificial sequence
  Synthetic oligonucleotide
accccgagtagctctcctga

SEQ ID NO: 1072 - DNA, 20 bp, Artificial sequence
  Synthetic oligonucleotide
agcccgaccccgagtagctc

SEQ ID NO: 1073 - DNA, 20 bp, Artificial sequence
  Synthetic oligonucleotide
caccccaccttctagcgggt

SEQ ID NO: 1074 - DNA, 20 bp, Artificial sequence
  Synthetic oligonucleotide
tggagtcctgctatggctta

SEQ ID NO: 1075 - DNA, 20 bp, Artificial sequence
  Synthetic oligonucleotide
ctaccgtgtcgctgcccctg

SEQ ID NO: 1076 - DNA, 20 bp, Artificial sequence
  Synthetic oligonucleotide
ggctagctaccgtgtcgctg

SEQ ID NO: 1077 - DNA, 20 bp, Artificial sequence
  Synthetic oligonucleotide
ccaatcgacggctagctacc

SEQ ID NO: 1078 - DNA, 20 bp, Artificial sequence
  Synthetic oligonucleotide
gccgtgttccatttatgagc

SEQ ID NO: 1079 - DNA, 20 bp, Artificial sequence
  Synthetic oligonucleotide
tctcagtcccagtctcgcat

SEQ ID NO: 1080 - DNA, 20 bp, Artificial sequence
  Synthetic oligonucleotide
caccgccggttccatctcag

SEQ ID NO: 1081 - DNA, 20 bp, Artificial sequence
  Synthetic oligonucleotide
ccaggtcggcctccatagaa

SEQ ID NO: 1082 - DNA, 20 bp, Artificial sequence
  Synthetic oligonucleotide
ccggcctcaccccaggttag

SEQ ID NO: 1083 - DNA, 20 bp, Artificial sequence
  Synthetic oligonucleotide
tcaatcaaccgccagtgagg

SEQ ID NO: 1084 - DNA, 20 bp, Artificial sequence
  Synthetic oligonucleotide
gggaaccgagcaagccccgc

SEQ ID NO: 1085 - DNA, 20 bp, Artificial sequence
  Synthetic oligonucleotide
ccccgtgtctggtattcact

SEQ ID NO: 1086 - DNA, 20 bp, Artificial sequence
  Synthetic oligonucleotide
agatcacagctgccccgtgt

SEQ ID NO: 1087 - DNA, 20 bp, Artificial sequence
  Synthetic oligonucleotide
cggtttaatcacttggaaag

SEQ ID NO: 1088 - DNA, 20 bp, Artificial sequence
  Synthetic oligonucleotide
ccgtccaggcatctagtacc

SEQ ID NO: 1089 - DNA, 20 bp, Artificial sequence
  Synthetic oligonucleotide
tctgaccccgtccaggcatc

SEQ ID NO: 1090 - DNA, 20 bp, Artificial sequence
  Synthetic oligonucleotide
tcagggtccttctgaccccg

SEQ ID NO: 1091 - DNA, 20 bp, Artificial sequence
  Synthetic oligonucleotide
tagccgcccaccaggagggt

SEQ ID NO: 1092 - DNA, 20 bp, Artificial sequence
  Synthetic oligonucleotide
gaggtatagccgcccaccag

SEQ ID NO: 1093 - DNA, 20 bp, Artificial sequence
  Synthetic oligonucleotide
aggccccccaagacttagcg

SEQ ID NO: 1094 - DNA, 20 bp, Artificial sequence
  Synthetic oligonucleotide
cgccctgcggccgagagggc

SEQ ID NO: 1095 - DNA, 20 bp, Artificial sequence
  Synthetic oligonucleotide
ccaattatagggctccccct

SEQ ID NO: 1096 - DNA, 20 bp, Artificial sequence
  Synthetic oligonucleotide
gacttgtccaattatagggc

SEQ ID NO: 1097 - DNA, 20 bp, Artificial sequence
  Synthetic oligonucleotide
ctgagtaggactcaaggatc

SEQ ID NO: 1098 - DNA, 20 bp, Artificial sequence
  Synthetic oligonucleotide
gtgaccagcaacgcagccca

SEQ ID NO: 1099 - DNA, 20 bp, Artificial sequence
  Synthetic oligonucleotide
aggaatgtgaccagcaacgc

SEQ ID NO: 1100 - DNA, 20 bp, Artificial sequence
  Synthetic oligonucleotide
ggtctgctggcgcagctcgg

SEQ ID NO: 1101 - DNA, 20 bp, Artificial sequence
  Synthetic oligonucleotide
ccactcggtctgctggcgca

SEQ ID NO: 1102 - DNA, 20 bp, Artificial sequence
  Synthetic oligonucleotide
aagcgacccagtgccagttc

SEQ ID NO: 1103 - DNA, 20 bp, Artificial sequence
  Synthetic oligonucleotide
atcccaaaagcgacccagtg

SEQ ID NO: 1104 - DNA, 20 bp, Artificial sequence
  Synthetic oligonucleotide
caggtaatcccaaaagcgac

SEQ ID NO: 1105 - DNA, 20 bp, Artificial sequence
  Synthetic oligonucleotide
ccagcgcaggtaatcccaaa

SEQ ID NO: 1106 - DNA, 20 bp, Artificial sequence
  Synthetic oligonucleotide
tccgatttgtaggccttcaa

SEQ ID NO: 1107 - DNA, 20 bp, Artificial sequence
  Synthetic oligonucleotide
tccagttccgatttgtaggc

SEQ ID NO: 1108 - DNA, 20 bp, Artificial sequence
  Synthetic oligonucleotide
ttgttcctccagttccgatt

SEQ ID NO: 1109 - DNA, 20 bp, Artificial sequence
  Synthetic oligonucleotide
ccttggacagccgtgcccgc

SEQ ID NO: 1110 - DNA, 20 bp, Artificial sequence
  Synthetic oligonucleotide
gtcctccatgtccgcgccca

SEQ ID NO: 1111 - DNA, 20 bp, Artificial sequence
  Synthetic oligonucleotide
gtactgcaccaggcggccgc

SEQ ID NO: 1112 - DNA, 20 bp, Artificial sequence
  Synthetic oligonucleotide
tctggccgagcatggcctgc

SEQ ID NO: 1113 - DNA, 20 bp, Artificial sequence
  Synthetic oligonucleotide
ctcggtgctctggccgagca

SEQ ID NO: 1114 - DNA, 20 bp, Artificial sequence
  Synthetic oligonucleotide
aggcgaggcgcacccgcagc

SEQ ID NO: 1115 - DNA, 20 bp, Artificial sequence
  Synthetic oligonucleotide
cttgcgcaggtgggaggcga

SEQ ID NO: 1116 - DNA, 20 bp, Artificial sequence
  Synthetic oligonucleotide
cgcttacgcagcttgcgcag

SEQ ID NO: 1117 - DNA, 20 bp, Artificial sequence
  Synthetic oligonucleotide
aggagccgcttacgcagctt

SEQ ID NO: 1118 - DNA, 20 bp, Artificial sequence
  Synthetic oligonucleotide
tcgcggaggagccgcttacg

SEQ ID NO: 1119 - DNA, 20 bp, Artificial sequence
  Synthetic oligonucleotide
atcggcatcgcggaggagcc

SEQ ID NO: 1120 - DNA, 20 bp, Artificial sequence
  Synthetic oligonucleotide
caggtcatcggcatcgcgga

SEQ ID NO: 1121 - DNA, 20 bp, Artificial sequence
  Synthetic oligonucleotide
cacgcggccctgttccacca

SEQ ID NO: 1122 - DNA, 20 bp, Artificial sequence
  Synthetic oligonucleotide
ggcccgcacgcggccctgtt

SEQ ID NO: 1123 - DNA, 20 bp, Artificial sequence
  Synthetic oligonucleotide
cagtggcggcccgcacgcgg

SEQ ID NO: 1124 - DNA, 20 bp, Artificial sequence
  Synthetic oligonucleotide
agcccacagtggcggcccgc

SEQ ID NO: 1125 - DNA, 20 bp, Artificial sequence
  Synthetic oligonucleotide
gctcctgtagcggctggccg

SEQ ID NO: 1126 - DNA, 20 bp, Artificial sequence
  Synthetic oligonucleotide
ctgggcccgctcctgtagcg

SEQ ID NO: 1127 - DNA, 20 bp, Artificial sequence
  Synthetic oligonucleotide
gcggtcgcgggtccggctgc

SEQ ID NO: 1128 - DNA, 20 bp, Artificial sequence
  Synthetic oligonucleotide
gtccaggcggtcgcgggtcc

SEQ ID NO: 1129 - DNA, 20 bp, Artificial sequence
  Synthetic oligonucleotide
accagctcttgaggcgggcc

SEQ ID NO: 1130 - DNA, 20 bp, Artificial sequence
  Synthetic oligonucleotide
gctcgaaccagctcttgagg

SEQ ID NO: 1131 - DNA, 20 bp, Artificial sequence
  Synthetic oligonucleotide
gttcagtgattgtcgctggg

SEQ ID NO: 1132 - DNA, 20 bp, Artificial sequence
  Synthetic oligonucleotide
gtcgcatggctgcaggcttc

SEQ ID NO: 1133 - DNA, 20 bp, Artificial sequence
  Synthetic oligonucleotide
cgcttctcaccggctcctgg

SEQ ID NO: 1134 - DNA, 20 bp, Artificial sequence
  Synthetic oligonucleotide
ccgactgcgcttctcaccgg

SEQ ID NO: 1135 - DNA, 20 bp, Artificial sequence
  Synthetic oligonucleotide
gtgcccccgactgcgcttct

SEQ ID NO: 1136 - DNA, 20 bp, Artificial sequence
  Synthetic oligonucleotide
tcatccccgtgcccccgact

SEQ ID NO: 1137 - DNA, 20 bp, Artificial sequence
  Synthetic oligonucleotide
ttaccaagccgcccccaacc

SEQ ID NO: 1138 - DNA, 20 bp, Artificial sequence
  Synthetic oligonucleotide
gcacatttaccaagccgccc

SEQ ID NO: 1139 - DNA, 20 bp, Artificial sequence
  Synthetic oligonucleotide
ccaagccttgttgcattatc

SEQ ID NO: 1140 - DNA, 20 bp, Artificial sequence
  Synthetic oligonucleotide
gtagctctcctgagactacc

SEQ ID NO: 1141 - DNA, 20 bp, Artificial sequence
  Synthetic oligonucleotide
gaccccgagtagctctcctg

SEQ ID NO: 1142 - DNA, 20 bp, Artificial sequence
  Synthetic oligonucleotide
aagcccgaccccgagtagct

SEQ ID NO: 1143 - DNA, 20 bp, Artificial sequence
  Synthetic oligonucleotide
tatggcttacatcccagtcc

SEQ ID NO: 1144 - DNA, 20 bp, Artificial sequence
  Synthetic oligonucleotide
cgtggagtcctgctatggct

SEQ ID NO: 1145 - DNA, 20 bp, Artificial sequence
  Synthetic oligonucleotide
gctaccgtgtcgctgcccct

SEQ ID NO: 1146 - DNA, 20 bp, Artificial sequence
  Synthetic oligonucleotide
cggctagctaccgtgtcgct

SEQ ID NO: 1147 - DNA, 20 bp, Artificial sequence
  Synthetic oligonucleotide
tctccaatcgacggctagct

SEQ ID NO: 1148 - DNA, 20 bp, Artificial sequence
  Synthetic oligonucleotide
cgccgtgttccatttatgag

SEQ ID NO: 1149 - DNA, 20 bp, Artificial sequence
  Synthetic oligonucleotide
ccggttccatctcagtccca

SEQ ID NO: 1150 - DNA, 20 bp, Artificial sequence
  Synthetic oligonucleotide
ccaccgccggttccatctca

SEQ ID NO: 1151 - DNA, 20 bp, Artificial sequence
  Synthetic oligonucleotide
ccccaggtcggcctccatag

SEQ ID NO: 1152 - DNA, 20 bp, Artificial sequence
  Synthetic oligonucleotide
ccgccagtgaggactcctcc

SEQ ID NO: 1153 - DNA, 20 bp, Artificial sequence
  Synthetic oligonucleotide
ctgtcaatcaaccgccagtg

SEQ ID NO: 1154 - DNA, 20 bp, Artificial sequence
  Synthetic oligonucleotide
atcgctgttcagagccagga

SEQ ID NO: 1155 - DNA, 20 bp, Artificial sequence
  Synthetic oligonucleotide
gccccgtgtctggtattcac

SEQ ID NO: 1156 - DNA, 20 bp, Artificial sequence
  Synthetic oligonucleotide
taaagatcacagctgccccg

SEQ ID NO: 1157 - DNA, 20 bp, Artificial sequence
  Synthetic oligonucleotide
gtcggtttaatcacttggaa

SEQ ID NO: 1158 - DNA, 20 bp, Artificial sequence
  Synthetic oligonucleotide
cccgtccaggcatctagtac

SEQ ID NO: 1159 - DNA, 20 bp, Artificial sequence
  Synthetic oligonucleotide
ttctgaccccgtccaggcat

SEQ ID NO: 1160 - DNA, 20 bp, Artificial sequence
  Synthetic oligonucleotide
gaacaagttcaaggtgggtc

SEQ ID NO: 1161 - DNA, 20 bp, Artificial sequence
  Synthetic oligonucleotide
atagccgcccaccaggaggg

SEQ ID NO: 1162 - DNA, 20 bp, Artificial sequence
  Synthetic oligonucleotide
ggaggtatagccgcccacca

SEQ ID NO: 1163 - DNA, 20 bp, Artificial sequence
  Synthetic oligonucleotide
cgagtgtgagagactgagtc

SEQ ID NO: 1164 - DNA, 20 bp, Artificial sequence
  Synthetic oligonucleotide
gcgccctgcggccgagaggg

SEQ ID NO: 1165 - DNA, 20 bp, Artificial sequence
  Synthetic oligonucleotide
catagaaaattccatcttcc

SEQ ID NO: 1166 - DNA, 20 bp, Artificial sequence
  Synthetic oligonucleotide
tttatgagctaattcagtcc

SEQ ID NO: 1167 - DNA, 20 bp, Artificial sequence
  Synthetic oligonucleotide
ccgctctgccactcggtctg

SEQ ID NO: 1168 - DNA, 20 bp, Artificial sequence
  Synthetic oligonucleotide
ctggtattcactatctgcct

SEQ ID NO: 1169 - DNA, 20 bp, Artificial sequence
  Synthetic oligonucleotide
taccaagccgcccccaaccc

SEQ ID NO: 1170 - DNA, 20 bp, Artificial sequence
  Synthetic oligonucleotide
ctctgctgcccagcccttcc

SEQ ID NO: 1171 - DNA, 20 bp, Artificial sequence
  Synthetic oligonucleotide
ccggctctgtctccaccgct

SEQ ID NO: 1172 - DNA, 20 bp, Artificial sequence
  Synthetic oligonucleotide
ggcttacatcccagtccagc

SEQ ID NO: 1173 - DNA, 20 bp, Artificial sequence
  Synthetic oligonucleotide
agcagagacccaggcccccc

SEQ ID NO: 1174 - DNA, 20 bp, Artificial sequence
  Synthetic oligonucleotide
aacaacaaaacaacttctaa

SEQ ID NO: 1175 - DNA, 20 bp, Artificial sequence
  Synthetic oligonucleotide
tccaccagcccggcccactg

SEQ ID NO: 1176 - DNA, 20 bp, Artificial sequence
  Synthetic oligonucleotide
caacgcagcccacagaacct

SEQ ID NO: 1177 - DNA, 20 bp, Artificial sequence
  Synthetic oligonucleotide
ctcttatctccccatcccca

SEQ ID NO: 1178 - DNA, 20 bp, Artificial sequence
  Synthetic oligonucleotide
ctcagtcccagtctcgcatt

SEQ ID NO: 1179 - DNA, 20 bp, Artificial sequence
  Synthetic oligonucleotide
agtcggtttaatcacttgga

SEQ ID NO: 1180 - DNA, 20 bp, Artificial sequence
  Synthetic oligonucleotide
cccaacccattccctattta

SEQ ID NO: 1181 - DNA, 20 bp, Artificial sequence
  Synthetic oligonucleotide
taagctccaacctcacagtt

SEQ ID NO: 1182 - DNA, 20 bp, Artificial sequence
  Synthetic oligonucleotide
aaagcattatgtatttataa

SEQ ID NO: 1183 - DNA, 20 bp, Artificial sequence
  Synthetic oligonucleotide
cacaggggcggcgctggtgc

SEQ ID NO: 1184 - DNA, 20 bp, Artificial sequence
  Synthetic oligonucleotide
cgcttgctccaccttggcct

SEQ ID NO: 1185 - DNA, 20 bp, Artificial sequence
  Synthetic oligonucleotide
cagcctaatcccagcacatt

SEQ ID NO: 1186 - DNA, 20 bp, Artificial sequence
  Synthetic oligonucleotide
gctcagacagtgtctgcacc

SEQ ID NO: 1187 - DNA, 20 bp, Artificial sequence
  Synthetic oligonucleotide
cccggccccaacccggcctc

SEQ ID NO: 1188 - DNA, 20 bp, Artificial sequence
  Synthetic oligonucleotide
cccttcacattctaagctcc

SEQ ID NO: 1189 - DNA, 20 bp, Artificial sequence
  Synthetic oligonucleotide
cagaaccttcatcttcctgc

SEQ ID NO: 1190 - DNA, 20 bp, Artificial sequence
  Synthetic oligonucleotide
cctcctggtcttctcttatc

SEQ ID NO: 1191 - DNA, 20 bp, Artificial sequence
  Synthetic oligonucleotide
gggttcaaattccatccccc

SEQ ID NO: 1192 - DNA, 20 bp, Artificial sequence
  Synthetic oligonucleotide
ccaggaggacggctggggcg

SEQ ID NO: 1193 - DNA, 20 bp, Artificial sequence
  Synthetic oligonucleotide
tggtgaatctttattaaact

SEQ ID NO: 1194 - DNA, 20 bp, Artificial sequence
  Synthetic oligonucleotide
gggcagaatgaaacctggac

SEQ ID NO: 1195 - DNA, 20 bp, Artificial sequence
  Synthetic oligonucleotide
ggcctcaccccaggttagcc

SEQ ID NO: 1196 - DNA, 20 bp, Artificial sequence
  Synthetic oligonucleotide
ccccctccccaccgccggtt

SEQ ID NO: 1197 - DNA, 20 bp, Artificial sequence
  Synthetic oligonucleotide
tccctatttaactccctcct

SEQ ID NO: 1198 - DNA, 20 bp, Artificial sequence
  Synthetic oligonucleotide
gcaagccccgcccccatacc

SEQ ID NO: 1199 - DNA, 20 bp, Artificial sequence
  Synthetic oligonucleotide
ggtgctcgataaatgatagt

SEQ ID NO: 1200 - DNA, 20 bp, Artificial sequence
  Synthetic oligonucleotide
agcggcctgaacatggttca

SEQ ID NO: 1201 - DNA, 20 bp, Artificial sequence
  Synthetic oligonucleotide
ggaagcagcacagaagcctc

SEQ ID NO: 1202 - DNA, 20 bp, Artificial sequence
  Synthetic oligonucleotide
gaaactgtcaatcaaccgcc

SEQ ID NO: 1203 - DNA, 20 bp, Artificial sequence
  Synthetic oligonucleotide
tcccagctctttctagaggc

SEQ ID NO: 1204 - DNA, 20 bp, Artificial sequence
  Synthetic oligonucleotide
cttctgaccccgtccaggca

SEQ ID NO: 1205 - DNA, 20 bp, Artificial sequence
  Synthetic oligonucleotide
gcgtggggtcgcatggctgc

SEQ ID NO: 1206 - DNA, 20 bp, Artificial sequence
  Synthetic oligonucleotide
tcagtcctcattttaaagtt

SEQ ID NO: 1207 - DNA, 20 bp, Artificial sequence
  Synthetic oligonucleotide
ctcccgctgcaggctgcgcg

SEQ ID NO: 1208 - DNA, 20 bp, Artificial sequence
  Synthetic oligonucleotide
agtgaggactcctcccaccc

SEQ ID NO: 1209 - DNA, 20 bp, Artificial sequence
  Synthetic oligonucleotide
gcacggggtggcgtggggtc

SEQ ID NO: 1210 - DNA, 20 bp, Artificial sequence
  Synthetic oligonucleotide
agtccagctgctctccccac

SEQ ID NO: 1211 - DNA, 20 bp, Artificial sequence
  Synthetic oligonucleotide
gaagctagaaccagcagaga

SEQ ID NO: 1212 - DNA, 20 bp, Artificial sequence
  Synthetic oligonucleotide
ggcccctgagctcatccccg

SEQ ID NO: 1213 - DNA, 20 bp, Artificial sequence
  Synthetic oligonucleotide
tcccaggtccagtcccctgc

SEQ ID NO: 1214 - DNA, 20 bp, Artificial sequence
  Synthetic oligonucleotide
taaagttctccaatcgacgg

SEQ ID NO: 1215 - DNA, 20 bp, Artificial sequence
  Synthetic oligonucleotide
ggggctcgaaccagctcttg

SEQ ID NO: 1216 - DNA, 20 bp, Artificial sequence
  Synthetic oligonucleotide
cctcacccccgctcctcctc

SEQ ID NO: 1217 - DNA, 20 bp, Artificial sequence
  Synthetic oligonucleotide
aggcttcggcgttcagtgat

SEQ ID NO: 1218 - DNA, 20 bp, Artificial sequence
  Synthetic oligonucleotide
caggtcggcctccatagaaa

SEQ ID NO: 1219 - DNA, 20 bp, Artificial sequence
  Synthetic oligonucleotide
ctcgcattcctcattctccc

SEQ ID NO: 1220 - DNA, 20 bp, Artificial sequence
  Synthetic oligonucleotide
ccacggcagcctgcaccttc

SEQ ID NO: 1221 - DNA, 20 bp, Artificial sequence
  Synthetic oligonucleotide
gcctgcaatgcattagaaac

SEQ ID NO: 1222 - DNA, 20 bp, Artificial sequence
  Synthetic oligonucleotide
gatggagaataaagatcaca

SEQ ID NO: 1223 - DNA, 20 bp, Artificial sequence
  Synthetic oligonucleotide
cttccaagccttgttgcatt

SEQ ID NO: 1224 - DNA, 20 bp, Artificial sequence
  Synthetic oligonucleotide
gggacagggtctcccgctgc

SEQ ID NO: 1225 - DNA, 20 bp, Artificial sequence
  Synthetic oligonucleotide
caacttctaactcctatctc

SEQ ID NO: 1226 - DNA, 20 bp, Artificial sequence
  Synthetic oligonucleotide
gaggcaggaggcacggggtg

SEQ ID NO: 1227 - DNA, 20 bp, Artificial sequence
  Synthetic oligonucleotide
gcccccatacctgccaggaa

SEQ ID NO: 1228 - DNA, 20 bp, Artificial sequence
  Synthetic oligonucleotide
ctgagcagctcctcctgcac

SEQ ID NO: 1229 - DNA, 20 bp, Artificial sequence
  Synthetic oligonucleotide
aggctgcgcggaggcaggag

SEQ ID NO: 1230 - DNA, 20 bp, Artificial sequence
  Synthetic oligonucleotide
ctgctgcttgcctcaccccc

SEQ ID NO: 1231 - DNA, 20 bp, Artificial sequence
  Synthetic oligonucleotide
tgcgtgaaacttggtgaatc

SEQ ID NO: 1232 - DNA, 20 bp, Artificial sequence
  Synthetic oligonucleotide
ttggtgaatctttattaaac

SEQ ID NO: 1233 - DNA, 20 bp, Artificial sequence
  Synthetic oligonucleotide
ctcctctccccaagcccgac

SEQ ID NO: 1234 - DNA, 20 bp, Artificial sequence
  Synthetic oligonucleotide
ggctggggcggggacagggt

SEQ ID NO: 1235 - DNA, 20 bp, Artificial sequence
  Synthetic oligonucleotide
ctctcctgagactacctgga

SEQ ID NO: 1236 - DNA, 20 bp, Artificial sequence
  Synthetic oligonucleotide
cattagaaacctctaactcc

SEQ ID NO: 1237 - DNA, 20 bp, Artificial sequence
  Synthetic oligonucleotide
attatctgcaacagcctaat

SEQ ID NO: 1238 - DNA, 20 bp, Artificial sequence
  Synthetic oligonucleotide
ctcctggtcttctcttatct

SEQ ID NO: 1239 - DNA, 20 bp, Artificial sequence
  Synthetic oligonucleotide
ggacagggtctcccgctgca

SEQ ID NO: 1240 - DNA, 20 bp, Artificial sequence
  Synthetic oligonucleotide
cctgcaatgcattagaaacc

SEQ ID NO: 1241 - DNA, 20 bp, Artificial sequence
  Synthetic oligonucleotide
ggtattcactatctgcctgc

SEQ ID NO: 1242 - DNA, 20 bp, Artificial sequence
  Synthetic oligonucleotide
aagctccaacctcacagtta

SEQ ID NO: 1243 - DNA, 20 bp, Artificial sequence
  Synthetic oligonucleotide
ggttcaaattccatcccccc

SEQ ID NO: 1244 - DNA, 20 bp, Artificial sequence
  Synthetic oligonucleotide
tctgctgcccagcccttccc

SEQ ID NO: 1245 - DNA, 20 bp, Artificial sequence
  Synthetic oligonucleotide
cagtcctcattttaaagttc

SEQ ID NO: 1246 - DNA, 20 bp, Artificial sequence
  Synthetic oligonucleotide
ggcagaatgaaacctggacc

SEQ ID NO: 1247 - DNA, 20 bp, Artificial sequence
  Synthetic oligonucleotide
cgtccaggcatctagtacct

SEQ ID NO: 1248 - DNA, 20 bp, Artificial sequence
  Synthetic oligonucleotide
cctatttaactccctcctgg

SEQ ID NO: 1249 - DNA, 20 bp, Artificial sequence
  Synthetic oligonucleotide
ggtcggcctccatagaaaat

SEQ ID NO: 1250 - DNA, 20 bp, Artificial sequence
  Synthetic oligonucleotide
agttctccaatcgacggcta

SEQ ID NO: 1251 - DNA, 20 bp, Artificial sequence
  Synthetic oligonucleotide
ctcacccccgctcctcctct

SEQ ID NO: 1252 - DNA, 20 bp, Artificial sequence
  Synthetic oligonucleotide
gctgcatgtcttccaccagg

SEQ ID NO: 1253 - DNA, 20 bp, Artificial sequence
  Synthetic oligonucleotide
cacggggtggcgtggggtcg

SEQ ID NO: 1254 - DNA, 20 bp, Artificial sequence
  Synthetic oligonucleotide
gcttacatcccagtccagct

SEQ ID NO: 1255 - DNA, 20 bp, Artificial sequence
  Synthetic oligonucleotide
gcctggcatcctgccaggaa

SEQ ID NO: 1256 - DNA, 20 bp, Artificial sequence
  Synthetic oligonucleotide
tgctgcttgcctcacccccg

SEQ ID NO: 1257 - DNA, 20 bp, Artificial sequence
  Synthetic oligonucleotide
tggagaataaagatcacagc

SEQ ID NO: 1258 - DNA, 20 bp, Artificial sequence
  Synthetic oligonucleotide
attagaaacctctaactccc

SEQ ID NO: 1259 - DNA, 20 bp, Artificial sequence
  Synthetic oligonucleotide
gcttgctccaccttggcctg

SEQ ID NO: 1260 - DNA, 20 bp, Artificial sequence
  Synthetic oligonucleotide
acaacaaaacaacttctaac

SEQ ID NO: 1261 - DNA, 20 bp, Artificial sequence
  Synthetic oligonucleotide
agaaccttcatcttcctgcc

SEQ ID NO: 1262 - DNA, 20 bp, Artificial sequence
  Synthetic oligonucleotide
tcgcattcctcattctccct

SEQ ID NO: 1263 - DNA, 20 bp, Artificial sequence
  Synthetic oligonucleotide
acgcagcccacagaaccttc

SEQ ID NO: 1264 - DNA, 20 bp, Artificial sequence
  Synthetic oligonucleotide
caagccccgcccccatacct

SEQ ID NO: 1265 - DNA, 20 bp, Artificial sequence
  Synthetic oligonucleotide
cgtggggtcgcatggctgca

SEQ ID NO: 1266 - DNA, 20 bp, Artificial sequence
  Synthetic oligonucleotide
ttatgagctaattcagtcct

SEQ ID NO: 1267 - DNA, 20 bp, Artificial sequence
  Synthetic oligonucleotide
aacttctaactcctatctca

SEQ ID NO: 1268 - DNA, 20 bp, Artificial sequence
  Synthetic oligonucleotide
cagagacccaggccccccaa

SEQ ID NO: 1269 - DNA, 20 bp, Artificial sequence
  Synthetic oligonucleotide
ggctgcgcggaggcaggagg

SEQ ID NO: 1270 - DNA, 20 bp, Artificial sequence
  Synthetic oligonucleotide
aagcattatgtatttataaa

SEQ ID NO: 1271 - DNA, 20 bp, Artificial sequence
  Synthetic oligonucleotide
aggcaggaggcacggggtgg

SEQ ID NO: 1272 - DNA, 20 bp, Artificial sequence
  Synthetic oligonucleotide
tcggtttaatcacttggaaa

SEQ ID NO: 1273 - DNA, 20 bp, Artificial sequence
  Synthetic oligonucleotide
ttatctgcaacagcctaatc

SEQ ID NO: 1274 - DNA, 20 bp, Artificial sequence
  Synthetic oligonucleotide
aagctagaaccagcagagac

SEQ ID NO: 1275 - DNA, 20 bp, Artificial sequence
  Synthetic oligonucleotide
gcggcctgaacatggttcac

SEQ ID NO: 1276 - DNA, 20 bp, Artificial sequence
  Synthetic oligonucleotide
gggtccaccccaggaggacg

SEQ ID NO: 1277 - DNA, 20 bp, Artificial sequence
  Synthetic oligonucleotide
tcagtcccagtctcgcattc

SEQ ID NO: 1278 - DNA, 20 bp, Artificial sequence
  Synthetic oligonucleotide
tcctgagactacctggaggc

SEQ ID NO: 1279 - DNA, 20 bp, Artificial sequence
  Synthetic oligonucleotide
ccggccccaacccggcctca

SEQ ID NO: 1280 - DNA, 20 bp, Artificial sequence
  Synthetic oligonucleotide
gcctcaccccaggttagcct

SEQ ID NO: 1281 - DNA, 20 bp, Artificial sequence
  Synthetic oligonucleotide
agcctaatcccagcacattt

SEQ ID NO: 1282 - DNA, 20 bp, Artificial sequence
  Synthetic oligonucleotide
aaactgtcaatcaaccgcca

SEQ ID NO: 1283 - DNA, 20 bp, Artificial sequence
  Synthetic oligonucleotide
cttcacattctaagctccaa

SEQ ID NO: 1284 - DNA, 20 bp, Artificial sequence
  Synthetic oligonucleotide
gagagaattccagagagcta

SEQ ID NO: 1285 - DNA, 20 bp, Artificial sequence
  Synthetic oligonucleotide
caggggcggcgctggtgccc

SEQ ID NO: 1286 - DNA, 20 bp, Artificial sequence
  Synthetic oligonucleotide
gctggggcggggacagggtc

SEQ ID NO: 1287 - DNA, 20 bp, Artificial sequence
  Synthetic oligonucleotide
atagaaaattccatcttcct

SEQ ID NO: 1288 - DNA, 20 bp, Artificial sequence
  Synthetic oligonucleotide
tattaaactagggtccaccc

SEQ ID NO: 1289 - DNA, 20 bp, Artificial sequence
  Synthetic oligonucleotide
acggcagcctgcaccttctc

SEQ ID NO: 1290 - DNA, 20 bp, Artificial sequence
  Synthetic oligonucleotide
tcctctccccaagcccgacc

SEQ ID NO: 1291 - DNA, 20 bp, Artificial sequence
  Synthetic oligonucleotide
tccagctgctctccccaccc

SEQ ID NO: 1292 - DNA, 20 bp, Artificial sequence
  Synthetic oligonucleotide
tgagcagctcctcctgcacc

SEQ ID NO: 1293 - DNA, 20 bp, Artificial sequence
  Synthetic oligonucleotide
gcccctgagctcatccccgt

SEQ ID NO: 1294 - DNA, 20 bp, Artificial sequence
  Synthetic oligonucleotide
gtgaggactcctcccacccc

SEQ ID NO: 1295 - DNA, 20 bp, Artificial sequence
  Synthetic oligonucleotide
ttccaagccttgttgcatta

SEQ ID NO: 1296 - DNA, 20 bp, Artificial sequence
  Synthetic oligonucleotide
ccaacccattccctatttaa

SEQ ID NO: 1297 - DNA, 20 bp, Artificial sequence
  Synthetic oligonucleotide
tgctcgataaatgatagtga

SEQ ID NO: 1298 - DNA, 20 bp, Artificial sequence
  Synthetic oligonucleotide
cggctctgtctccaccgctt

SEQ ID NO: 1299 - DNA, 20 bp, Artificial sequence
  Synthetic oligonucleotide
cccaggtccagtcccctgct

SEQ ID NO: 1300 - DNA, 20 bp, Artificial sequence
  Synthetic oligonucleotide
ggtgaatctttattaaacta

SEQ ID NO: 1301 - DNA, 20 bp, Artificial sequence
  Synthetic oligonucleotide
cccctccccaccgccggttc

SEQ ID NO: 1302 - DNA, 20 bp, Artificial sequence
  Synthetic oligonucleotide
caccagcccggcccactggc

SEQ ID NO: 1303 - DNA, 20 bp, Artificial sequence
  Synthetic oligonucleotide
acagtgtctgcacccagcgc

SEQ ID NO: 1304 - DNA, 20 bp, Artificial sequence
  Synthetic oligonucleotide
gaagcagcacagaagcctca

SEQ ID NO: 1305 - DNA, 20 bp, Artificial sequence
  Synthetic oligonucleotide
gcgtgaaacttggtgaatct

SEQ ID NO: 1306 - DNA, 20 bp, Artificial sequence
  Synthetic oligonucleotide
tcttatctccccatccccag

SEQ ID NO: 1307 - DNA, 20 bp, Artificial sequence
  Synthetic oligonucleotide
cgctctgccactcggtctgc

SEQ ID NO: 1308 - DNA, 20 bp, Artificial sequence
  Synthetic oligonucleotide
accaagccgcccccaaccca

SEQ ID NO: 1309 - DNA, 20 bp, Artificial sequence
  Synthetic oligonucleotide
caggaggacggctggggcgg

SEQ ID NO: 1310 - DNA, 20 bp, Artificial sequence
  Synthetic oligonucleotide
cccagctctttctagaggcc

SEQ ID NO: 1311 - DNA, 20 bp, Artificial sequence
  Synthetic oligonucleotide
ggcttcggcgttcagtgatt

SEQ ID NO: 1312 - DNA, 20 bp, Artificial sequence
  Synthetic oligonucleotide
gcttcggcgttcagtgattg

SEQ ID NO: 1313 - DNA, 20 bp, Artificial sequence
  Synthetic oligonucleotide
ccaagccgcccccaacccat

SEQ ID NO: 1314 - DNA, 20 bp, Artificial sequence
  Synthetic oligonucleotide
gctcgataaatgatagtgac

SEQ ID NO: 1315 - DNA, 20 bp, Artificial sequence
  Synthetic oligonucleotide
ggcaggaggcacggggtggc

SEQ ID NO: 1316 - DNA, 20 bp, Artificial sequence
  Synthetic oligonucleotide
agtcctcattttaaagttct

SEQ ID NO: 1317 - DNA, 20 bp, Artificial sequence
  Synthetic oligonucleotide
atggctgcaggcttcggcgt

SEQ ID NO: 1318 - DNA, 20 bp, Artificial sequence
  Synthetic oligonucleotide
caggtccagtcccctgctgc

SEQ ID NO: 1319 - DNA, 20 bp, Artificial sequence
  Synthetic oligonucleotide
tgcatgtcttccaccagggg

SEQ ID NO: 1320 - DNA, 20 bp, Artificial sequence
  Synthetic oligonucleotide
cgcattcctcattctccctt

SEQ ID NO: 1321 - DNA, 20 bp, Artificial sequence
  Synthetic oligonucleotide
gagacccaggccccccaaga

SEQ ID NO: 1322 - DNA, 20 bp, Artificial sequence
  Synthetic oligonucleotide
tcctggtcttctcttatctc

SEQ ID NO: 1323 - DNA, 20 bp, Artificial sequence
  Synthetic oligonucleotide
cggccccaacccggcctcac

SEQ ID NO: 1324 - DNA, 20 bp, Artificial sequence
  Synthetic oligonucleotide
gtttaatcacttggaaagca

SEQ ID NO: 1325 - DNA, 20 bp, Artificial sequence
  Synthetic oligonucleotide
tgaggactcctcccaccccc

SEQ ID NO: 1326 - DNA, 20 bp, Artificial sequence
  Synthetic oligonucleotide
aggaggacggctggggcggg

SEQ ID NO: 1327 - DNA, 20 bp, Artificial sequence
  Synthetic oligonucleotide
cagtgtctgcacccagcgca

SEQ ID NO: 1328 - DNA, 20 bp, Artificial sequence
  Synthetic oligonucleotide
gcctaatcccagcacattta

SEQ ID NO: 1329 - DNA, 20 bp, Artificial sequence
  Synthetic oligonucleotide
ccagctgctctccccacccc

SEQ ID NO: 1330 - DNA, 20 bp, Artificial sequence
  Synthetic oligonucleotide
agctccaacctcacagttaa

SEQ ID NO: 1331 - DNA, 20 bp, Artificial sequence
  Synthetic oligonucleotide
ctggggcggggacagggtct

SEQ ID NO: 1332 - DNA, 20 bp, Artificial sequence
  Synthetic oligonucleotide
tagaaaattccatcttcctc

SEQ ID NO: 1333 - DNA, 20 bp, Artificial sequence
  Synthetic oligonucleotide
ccagcccggcccactggcgc

SEQ ID NO: 1334 - DNA, 20 bp, Artificial sequence
  Synthetic oligonucleotide
ctgcaatgcattagaaacct

SEQ ID NO: 1335 - DNA, 20 bp, Artificial sequence
  Synthetic oligonucleotide
tatttaactccctcctggtc

SEQ ID NO: 1336 - DNA, 20 bp, Artificial sequence
  Synthetic oligonucleotide
ctgctgcccagcccttccca

SEQ ID NO: 1337 - DNA, 20 bp, Artificial sequence
  Synthetic oligonucleotide
acttctaactcctatctcaa

SEQ ID NO: 1338 - DNA, 20 bp, Artificial sequence
  Synthetic oligonucleotide
aaggtgctccacaaatgctt

SEQ ID NO: 1339 - DNA, 20 bp, Artificial sequence
  Synthetic oligonucleotide
caacaaaacaacttctaact

SEQ ID NO: 1340 - DNA, 20 bp, Artificial sequence
  Synthetic oligonucleotide
gccttgttgcattatctgca

SEQ ID NO: 1341 - DNA, 20 bp, Artificial sequence
  Synthetic oligonucleotide
gctctgtctccaccgcttgc

SEQ ID NO: 1342 - DNA, 20 bp, Artificial sequence
  Synthetic oligonucleotide
ttcacattctaagctccaac

SEQ ID NO: 1343 - DNA, 20 bp, Artificial sequence
  Synthetic oligonucleotide
gtcccagtctcgcattcctc

SEQ ID NO: 1344 - DNA, 20 bp, Artificial sequence
  Synthetic oligonucleotide
ggagaataaagatcacagct

SEQ ID NO: 1345 - DNA, 20 bp, Artificial sequence
  Synthetic oligonucleotide
gttcaaattccatcccccca

SEQ ID NO: 1346 - DNA, 20 bp, Artificial sequence
  Synthetic oligonucleotide
cgcagcccacagaaccttca

SEQ ID NO: 1347 - DNA, 20 bp, Artificial sequence
  Synthetic oligonucleotide
gctctgccactcggtctgct

SEQ ID NO: 1348 - DNA, 20 bp, Artificial sequence
  Synthetic oligonucleotide
ccctgagctcatccccgtgc

SEQ ID NO: 1349 - DNA, 20 bp, Artificial sequence
  Synthetic oligonucleotide
gcattatgtatttataaaca

SEQ ID NO: 1350 - DNA, 20 bp, Artificial sequence
  Synthetic oligonucleotide
tatgagctaattcagtcctc

SEQ ID NO: 1351 - DNA, 20 bp, Artificial sequence
  Synthetic oligonucleotide
ggcagcctgcaccttctcca

SEQ ID NO: 1352 - DNA, 20 bp, Artificial sequence
  Synthetic oligonucleotide
tcacccccgctcctcctctc

SEQ ID NO: 1353 - DNA, 20 bp, Artificial sequence
  Synthetic oligonucleotide
cctcaccccaggttagcctt

SEQ ID NO: 1354 - DNA, 20 bp, Artificial sequence
  Synthetic oligonucleotide
ccctccccaccgccggttcc

SEQ ID NO: 1355 - DNA, 20 bp, Artificial sequence
  Synthetic oligonucleotide
gtggggtcgcatggctgcag

SEQ ID NO: 1356 - DNA, 20 bp, Artificial sequence
  Synthetic oligonucleotide
gctgcgcggaggcaggaggc

SEQ ID NO: 1357 - DNA, 20 bp, Artificial sequence
  Synthetic oligonucleotide
cctctccccaagcccgaccc

SEQ ID NO: 1358 - DNA, 20 bp, Artificial sequence
  Synthetic oligonucleotide
ttagaaacctctaactccca

SEQ ID NO: 1359 - DNA, 20 bp, Artificial sequence
  Synthetic oligonucleotide
gcagaatgaaacctggacct

SEQ ID NO: 1360 - DNA, 20 bp, Artificial sequence
  Synthetic oligonucleotide
cttatctccccatccccagg

SEQ ID NO: 1361 - DNA, 20 bp, Artificial sequence
  Synthetic oligonucleotide
gcagcacagaagcctcagaa

SEQ ID NO: 1362 - DNA, 20 bp, Artificial sequence
  Synthetic oligonucleotide
agtgattgtcgctgggcaca

SEQ ID NO: 1363 - DNA, 20 bp, Artificial sequence
  Synthetic oligonucleotide
gtcggcctccatagaaaatt

SEQ ID NO: 1364 - DNA, 20 bp, Artificial sequence
  Synthetic oligonucleotide
acggggtggcgtggggtcgc

SEQ ID NO: 1365 - DNA, 20 bp, Artificial sequence
  Synthetic oligonucleotide
ttgctccaccttggcctggc

SEQ ID NO: 1366 - DNA, 20 bp, Artificial sequence
  Synthetic oligonucleotide
aactgtcaatcaaccgccag

SEQ ID NO: 1367 - DNA, 20 bp, Artificial sequence
  Synthetic oligonucleotide
gagcagctcctcctgcacct

SEQ ID NO: 1368 - DNA, 20 bp, Artificial sequence
  Synthetic oligonucleotide
gaaccttcatcttcctgcct

SEQ ID NO: 1369 - DNA, 20 bp, Artificial sequence
  Synthetic oligonucleotide
tatctgcaacagcctaatcc

SEQ ID NO: 1370 - DNA, 20 bp, Artificial sequence
  Synthetic oligonucleotide
ttacatcccagtccagctgc

SEQ ID NO: 1371 - DNA, 20 bp, Artificial sequence
  Synthetic oligonucleotide
aagccccgcccccatacctg

SEQ ID NO: 1372 - DNA, 20 bp, Artificial sequence
  Synthetic oligonucleotide
ccagctctttctagaggccc

SEQ ID NO: 1373 - DNA, 20 bp, Artificial sequence
  Synthetic oligonucleotide
gacagggtctcccgctgcag

SEQ ID NO: 1374 - DNA, 20 bp, Artificial sequence
  Synthetic oligonucleotide
ctgaacatggttcactgcaa

SEQ ID NO: 1375 - DNA, 20 bp, Artificial sequence
  Synthetic oligonucleotide
agctagaaccagcagagacc

SEQ ID NO: 1376 - DNA, 20 bp, Artificial sequence
  Synthetic oligonucleotide
gctgcttgcctcacccccgc

SEQ ID NO: 1377 - DNA, 20 bp, Artificial sequence
  Synthetic oligonucleotide
cctgagactacctggaggcc

SEQ ID NO: 1378 - DNA, 20 bp, Artificial sequence
  Synthetic oligonucleotide
gtgaatctttattaaactag

SEQ ID NO: 1379 - DNA, 20 bp, Artificial sequence
  Synthetic oligonucleotide
ggggcggcgctggtgcccac

SEQ ID NO: 1380 - DNA, 20 bp, Artificial sequence
  Synthetic oligonucleotide
cccccatacctgccaggaat

SEQ ID NO: 1381 - DNA, 20 bp, Artificial sequence
  Synthetic oligonucleotide
aattccagagagctaaagcc

SEQ ID NO: 1382 - DNA, 20 bp, Artificial sequence
  Synthetic oligonucleotide
caacccattccctatttaac

SEQ ID NO: 1383 - DNA, 20 bp, Artificial sequence
  Synthetic oligonucleotide
cgtgtcgctgcccctggctc

SEQ ID NO: 1384 - DNA, 20 bp, Artificial sequence
  Synthetic oligonucleotide
gtattcactatctgcctgca

SEQ ID NO: 1385 - DNA, 20 bp, Artificial sequence
  Synthetic oligonucleotide
tattcactatctgcctgcaa

SEQ ID NO: 1386 - DNA, 20 bp, Artificial sequence
  Synthetic oligonucleotide
ccgctgcaggctgcgcggag

SEQ ID NO: 1387 - DNA, 20 bp, Artificial sequence
  Synthetic oligonucleotide
cggggtggcgtggggtcgca

SEQ ID NO: 1388 - DNA, 20 bp, Artificial sequence
  Synthetic oligonucleotide
catgtcttccaccaggggct

SEQ ID NO: 1389 - DNA, 20 bp, Artificial sequence
  Synthetic oligonucleotide
gctggcgcagctcgggctcc

SEQ ID NO: 1390 - DNA, 20 bp, Artificial sequence
  Synthetic oligonucleotide
accttcatcttcctgcctgt

SEQ ID NO: 1391 - DNA, 20 bp, Artificial sequence
  Synthetic oligonucleotide
tctgcaacagcctaatccca

SEQ ID NO: 1392 - DNA, 20 bp, Artificial sequence
  Synthetic oligonucleotide
atgagctaattcagtcctca

SEQ ID NO: 1393 - DNA, 20 bp, Artificial sequence
  Synthetic oligonucleotide
gcaggaggcacggggtggcg

SEQ ID NO: 1394 - DNA, 20 bp, Artificial sequence
  Synthetic oligonucleotide
attccagagagctaaagcca

SEQ ID NO: 1395 - DNA, 20 bp, Artificial sequence
  Synthetic oligonucleotide
ggcggcgctggtgcccacgg

SEQ ID NO: 1396 - DNA, 20 bp, Artificial sequence
  Synthetic oligonucleotide
tgctccaccttggcctggca

SEQ ID NO: 1397 - DNA, 20 bp, Artificial sequence
  Synthetic oligonucleotide
aacaaaacaacttctaactc

SEQ ID NO: 1398 - DNA, 20 bp, Artificial sequence
  Synthetic oligonucleotide
ttaatcacttggaaagcatt

SEQ ID NO: 1399 - DNA, 20 bp, Artificial sequence
  Synthetic oligonucleotide
gtgtcgctgcccctggctcc

SEQ ID NO: 1400 - DNA, 20 bp, Artificial sequence
  Synthetic oligonucleotide
tgcaatgcattagaaacctc

SEQ ID NO: 1401 - DNA, 20 bp, Artificial sequence
  Synthetic oligonucleotide
tcggcctccatagaaaattc

SEQ ID NO: 1402 - DNA, 20 bp, Artificial sequence
  Synthetic oligonucleotide
agaaaattccatcttcctct

SEQ ID NO: 1403 - DNA, 20 bp, Artificial sequence
  Synthetic oligonucleotide
cacccccgctcctcctctcc

SEQ ID NO: 1404 - DNA, 20 bp, Artificial sequence
  Synthetic oligonucleotide
tcccagtctcgcattcctca

SEQ ID NO: 1405 - DNA, 20 bp, Artificial sequence
  Synthetic oligonucleotide
agccgcccccaacccattcc

SEQ ID NO: 1406 - DNA, 20 bp, Artificial sequence
  Synthetic oligonucleotide
tggggtcgcatggctgcagg

SEQ ID NO: 1407 - DNA, 20 bp, Artificial sequence
  Synthetic oligonucleotide
gtcctcattttaaagttctc

SEQ ID NO: 1408 - DNA, 20 bp, Artificial sequence
  Synthetic oligonucleotide
aacccattccctatttaact

SEQ ID NO: 1409 - DNA, 20 bp, Artificial sequence
  Synthetic oligonucleotide
tgaatctttattaaactagg

SEQ ID NO: 1410 - DNA, 20 bp, Artificial sequence
  Synthetic oligonucleotide
aggtccagtcccctgctgct

SEQ ID NO: 1411 - DNA, 20 bp, Artificial sequence
  Synthetic oligonucleotide
ctccaacctcacagttaagc

SEQ ID NO: 1412 - DNA, 20 bp, Artificial sequence
  Synthetic oligonucleotide
agccccgcccccatacctgc

SEQ ID NO: 1413 - DNA, 20 bp, Artificial sequence
  Synthetic oligonucleotide
cttcggcgttcagtgattgt

SEQ ID NO: 1414 - DNA, 20 bp, Artificial sequence
  Synthetic oligonucleotide
ggaggacggctggggcgggg

SEQ ID NO: 1415 - DNA, 20 bp, Artificial sequence
  Synthetic oligonucleotide
tgattgtcgctgggcacagg

SEQ ID NO: 1416 - DNA, 20 bp, Artificial sequence
  Synthetic oligonucleotide
cctggcatcctgccaggaat

SEQ ID NO: 1417 - DNA, 20 bp, Artificial sequence
  Synthetic oligonucleotide
actgtcaatcaaccgccagt

SEQ ID NO: 1418 - DNA, 20 bp, Artificial sequence
  Synthetic oligonucleotide
accccaggttagccttccaa

SEQ ID NO: 1419 - DNA, 20 bp, Artificial sequence
  Synthetic oligonucleotide
ctcgataaatgatagtgaca

SEQ ID NO: 1420 - DNA, 20 bp, Artificial sequence
  Synthetic oligonucleotide
gaggactcctcccaccccca

SEQ ID NO: 1421 - DNA, 20 bp, Artificial sequence
  Synthetic oligonucleotide
gctcctcctgcacctgctca

SEQ ID NO: 1422 - DNA, 20 bp, Artificial sequence
  Synthetic oligonucleotide
ctctccccaagcccgacccc

SEQ ID NO: 1423 - DNA, 20 bp, Artificial sequence
  Synthetic oligonucleotide
tacatcccagtccagctgct

SEQ ID NO: 1424 - DNA, 20 bp, Artificial sequence
  Synthetic oligonucleotide
cagcctgcaccttctccacc

SEQ ID NO: 1425 - DNA, 20 bp, Artificial sequence
  Synthetic oligonucleotide
acagggtctcccgctgcagg

SEQ ID NO: 1426 - DNA, 20 bp, Artificial sequence
  Synthetic oligonucleotide
cttctaactcctatctcaag

SEQ ID NO: 1427 - DNA, 20 bp, Artificial sequence
  Synthetic oligonucleotide
cctaatcccagcacatttac

SEQ ID NO: 1428 - DNA, 20 bp, Artificial sequence
  Synthetic oligonucleotide
cattatgtatttataaacag

SEQ ID NO: 1429 - DNA, 20 bp, Artificial sequence
  Synthetic oligonucleotide
ttatctccccatccccaggt

SEQ ID NO: 1430 - DNA, 20 bp, Artificial sequence
  Synthetic oligonucleotide
agacccaggccccccaagac

SEQ ID NO: 1431 - DNA, 20 bp, Artificial sequence
  Synthetic oligonucleotide
tgcccagcccttcccaggtc

SEQ ID NO: 1432 - DNA, 20 bp, Artificial sequence
  Synthetic oligonucleotide
cctggtcttctcttatctcc

SEQ ID NO: 1433 - DNA, 20 bp, Artificial sequence
  Synthetic oligonucleotide
cagctctttctagaggcccc

SEQ ID NO: 1434 - DNA, 20 bp, Artificial sequence
  Synthetic oligonucleotide
tgctctccccaccccacctt

SEQ ID NO: 1435 - DNA, 20 bp, Artificial sequence
  Synthetic oligonucleotide
ctgagactacctggaggcca

SEQ ID NO: 1436 - DNA, 20 bp, Artificial sequence
  Synthetic oligonucleotide
tagaaacctctaactcccag

SEQ ID NO: 1437 - DNA, 20 bp, Artificial sequence
  Synthetic oligonucleotide
ttcaaattccatccccccac

SEQ ID NO: 1438 - DNA, 20 bp, Artificial sequence
  Synthetic oligonucleotide
agaataaagatcacagctgc

SEQ ID NO: 1439 - DNA, 20 bp, Artificial sequence
  Synthetic oligonucleotide
ctctgtctccaccgcttgct

SEQ ID NO: 1440 - DNA, 20 bp, Artificial sequence
  Synthetic oligonucleotide
ctgcacccagcgcaggtaat

SEQ ID NO: 1441 - DNA, 20 bp, Artificial sequence
  Synthetic oligonucleotide
tggctgcaggcttcggcgtt

SEQ ID NO: 1442 - DNA, 20 bp, Artificial sequence
  Synthetic oligonucleotide
tggggcggggacagggtctc

SEQ ID NO: 1443 - DNA, 20 bp, Artificial sequence
  Synthetic oligonucleotide
cctccccaccgccggttcca

SEQ ID NO: 1444 - DNA, 20 bp, Artificial sequence
  Synthetic oligonucleotide
ctgcgcggaggcaggaggca

SEQ ID NO: 1445 - DNA, 20 bp, Artificial sequence
  Synthetic oligonucleotide
ccttgttgcattatctgcaa

SEQ ID NO: 1446 - DNA, 20 bp, Artificial sequence
  Synthetic oligonucleotide
cctgagctcatccccgtgcc

SEQ ID NO: 1447 - DNA, 20 bp, Artificial sequence
  Synthetic oligonucleotide
ctgcttgcctcacccccgct

SEQ ID NO: 1448 - DNA, 20 bp, Artificial sequence
  Synthetic oligonucleotide
atttaactccctcctggtct

SEQ ID NO: 1449 - DNA, 20 bp, Artificial sequence
  Synthetic oligonucleotide
gctagaaccagcagagaccc

SEQ ID NO: 1450 - DNA, 20 bp, Artificial sequence
  Synthetic oligonucleotide
ctcattctcccttcacattc

SEQ ID NO: 1451 - DNA, 20 bp, Artificial sequence
  Synthetic oligonucleotide
tcacattctaagctccaacc

SEQ ID NO: 1452 - DNA, 20 bp, Artificial sequence
  Synthetic oligonucleotide
agcccggcccactggcgctg

SEQ ID NO: 1453 - DNA, 20 bp, Artificial sequence
  Synthetic oligonucleotide
aggtgctccacaaatgcttc

SEQ ID NO: 1454 - DNA, 20 bp, Artificial sequence
  Synthetic oligonucleotide
ccgcgcccagcggaaaagca

SEQ ID NO: 1455 - DNA, 20 bp, Artificial sequence
  Synthetic oligonucleotide
acagaagcctcagaagaggg

SEQ ID NO: 1456 - DNA, 20 bp, Artificial sequence
  Synthetic oligonucleotide
gccccaacccggcctcaccc

SEQ ID NO: 1457 - DNA, 20 bp, Artificial sequence
  Synthetic oligonucleotide
tcctcattttaaagttctcc

SEQ ID NO: 1458 - DNA, 20 bp, Artificial sequence
  Synthetic oligonucleotide
ctagaaccagcagagaccca

SEQ ID NO: 1459 - DNA, 20 bp, Artificial sequence
  Synthetic oligonucleotide
ggggcggggacagggtctcc

SEQ ID NO: 1460 - DNA, 20 bp, Artificial sequence
  Synthetic oligonucleotide
cgctgcaggctgcgcggagg

SEQ ID NO: 1461 - DNA, 20 bp, Artificial sequence
  Synthetic oligonucleotide
ggggtggcgtggggtcgcat

SEQ ID NO: 1462 - DNA, 20 bp, Artificial sequence
  Synthetic oligonucleotide
acccattccctatttaactc

SEQ ID NO: 1463 - DNA, 20 bp, Artificial sequence
  Synthetic oligonucleotide
cccaggttagccttccaagc

SEQ ID NO: 1464 - DNA, 20 bp, Artificial sequence
  Synthetic oligonucleotide
acatcccagtccagctgctc

SEQ ID NO: 1465 - DNA, 20 bp, Artificial sequence
  Synthetic oligonucleotide
cccagtctcgcattcctcat

SEQ ID NO: 1466 - DNA, 20 bp, Artificial sequence
  Synthetic oligonucleotide
caggaggcacggggtggcgt

SEQ ID NO: 1467 - DNA, 20 bp, Artificial sequence
  Synthetic oligonucleotide
tgcgcggaggcaggaggcac

SEQ ID NO: 1468 - DNA, 20 bp, Artificial sequence
  Synthetic oligonucleotide
ctgagctcatccccgtgccc

SEQ ID NO: 1469 - DNA, 20 bp, Artificial sequence
  Synthetic oligonucleotide
cagggtctcccgctgcaggc

SEQ ID NO: 1470 - DNA, 20 bp, Artificial sequence
  Synthetic oligonucleotide
tgtcgctgcccctggctccc

SEQ ID NO: 1471 - DNA, 20 bp, Artificial sequence
  Synthetic oligonucleotide
ttctaactcctatctcaagg

SEQ ID NO: 1472 - DNA, 20 bp, Artificial sequence
  Synthetic oligonucleotide
tctgtctccaccgcttgctc

SEQ ID NO: 1473 - DNA, 20 bp, Artificial sequence
  Synthetic oligonucleotide
tatctccccatccccaggtc

SEQ ID NO: 1474 - DNA, 20 bp, Artificial sequence
  Synthetic oligonucleotide
gggacactcacctcagttcc

SEQ ID NO: 1475 - DNA, 20 bp, Artificial sequence
  Synthetic oligonucleotide
gccccgcccccatacctgcc

SEQ ID NO: 1476 - DNA, 20 bp, Artificial sequence
  Synthetic oligonucleotide
ggcctccatagaaaattcca

SEQ ID NO: 1477 - DNA, 20 bp, Artificial sequence
  Synthetic oligonucleotide
tcaaattccatccccccacc

SEQ ID NO: 1478 - DNA, 20 bp, Artificial sequence
  Synthetic oligonucleotide
cccagcggaaaagcatgtat

SEQ ID NO: 1479 - DNA, 20 bp, Artificial sequence
  Synthetic oligonucleotide
acaaaacaacttctaactcc

SEQ ID NO: 1480 - DNA, 20 bp, Artificial sequence
  Synthetic oligonucleotide
tttaactccctcctggtctt

SEQ ID NO: 1481 - DNA, 20 bp, Artificial sequence
  Synthetic oligonucleotide
cttgttgcattatctgcaac

SEQ ID NO: 1482 - DNA, 20 bp, Artificial sequence
  Synthetic oligonucleotide
tgtcaatcaaccgccagtga

SEQ ID NO: 1483 - DNA, 20 bp, Artificial sequence
  Synthetic oligonucleotide
cccgctcctcctctccccaa

SEQ ID NO: 1484 - DNA, 20 bp, Artificial sequence
  Synthetic oligonucleotide
tgcttgcctcacccccgctc

SEQ ID NO: 1485 - DNA, 20 bp, Artificial sequence
  Synthetic oligonucleotide
cttcatcttcctgcctgtga

SEQ ID NO: 1486 - DNA, 20 bp, Artificial sequence
  Synthetic oligonucleotide
tgtcttccaccaggggctcg

SEQ ID NO: 1487 - DNA, 20 bp, Artificial sequence
  Synthetic oligonucleotide
gacccaggccccccaagact

SEQ ID NO: 1488 - DNA, 20 bp, Artificial sequence
  Synthetic oligonucleotide
gcgcagctcgggctccggct

SEQ ID NO: 1489 - DNA, 20 bp, Artificial sequence
  Synthetic oligonucleotide
tccaacctcacagttaagcg

SEQ ID NO: 1490 - DNA, 20 bp, Artificial sequence
  Synthetic oligonucleotide
ctccccaagcccgaccccga

SEQ ID NO: 1491 - DNA, 20 bp, Artificial sequence
  Synthetic oligonucleotide
cccggcccactggcgctgca

SEQ ID NO: 1492 - DNA, 20 bp, Artificial sequence
  Synthetic oligonucleotide
ccccaacccggcctcacccc

SEQ ID NO: 1493 - DNA, 20 bp, Artificial sequence
  Synthetic oligonucleotide
gaatctttattaaactaggg

SEQ ID NO: 1494 - DNA, 20 bp, Artificial sequence
  Synthetic oligonucleotide
ctaatcccagcacatttacc

SEQ ID NO: 1495 - DNA, 20 bp, Artificial sequence
  Synthetic oligonucleotide
agaaacctctaactcccagc

SEQ ID NO: 1496 - DNA, 20 bp, Artificial sequence
  Synthetic oligonucleotide
ggtgctccacaaatgcttct

SEQ ID NO: 1497 - DNA, 20 bp, Artificial sequence
  Synthetic oligonucleotide
gaataaagatcacagctgcc

SEQ ID NO: 1498 - DNA, 20 bp, Artificial sequence
  Synthetic oligonucleotide
gcctgcaccttctccaccag

SEQ ID NO: 1499 - DNA, 20 bp, Artificial sequence
  Synthetic oligonucleotide
ctggtcttctcttatctccc

SEQ ID NO: 1500 - DNA, 20 bp, Artificial sequence
  Synthetic oligonucleotide
ctgcaacagcctaatcccag

SEQ ID NO: 1501 - DNA, 20 bp, Artificial sequence
  Synthetic oligonucleotide
gcccagcccttcccaggtcc

SEQ ID NO: 1502 - DNA, 20 bp, Artificial sequence
  Synthetic oligonucleotide
gttcccagggtcccagctct

SEQ ID NO: 1503 - DNA, 20 bp, Artificial sequence
  Synthetic oligonucleotide
agctaattcagtcctcattt

SEQ ID NO: 1504 - DNA, 20 bp, Artificial sequence
  Synthetic oligonucleotide
ggtccagtcccctgctgctt

SEQ ID NO: 1505 - DNA, 20 bp, Artificial sequence
  Synthetic oligonucleotide
ccagagagctaaagccagga

SEQ ID NO: 1506 - DNA, 20 bp, Artificial sequence
  Synthetic oligonucleotide
tcctcccacccccagcccgg

SEQ ID NO: 1507 - DNA, 20 bp, Artificial sequence
  Synthetic oligonucleotide
ggctgcaggcttcggcgttc

SEQ ID NO: 1508 - DNA, 20 bp, Artificial sequence
  Synthetic oligonucleotide
tccaccccaggaggacggct

SEQ ID NO: 1509 - DNA, 20 bp, Artificial sequence
  Synthetic oligonucleotide
gaaaattccatcttcctctc

SEQ ID NO: 1510 - DNA, 20 bp, Artificial sequence
  Synthetic oligonucleotide
cggcgctggtgcccacggca

SEQ ID NO: 1511 - DNA, 20 bp, Artificial sequence
  Synthetic oligonucleotide
cccaccgccggttccatctc

SEQ ID NO: 1512 - DNA, 20 bp, Artificial sequence
  Synthetic oligonucleotide
ttcggcgttcagtgattgtc

SEQ ID NO: 1513 - DNA, 20 bp, Artificial sequence
  Synthetic oligonucleotide
cacttggaaagcattatgta

SEQ ID NO: 1514 - DNA, 20 bp, Artificial sequence
  Synthetic oligonucleotide
agcccacagaaccttcatct

SEQ ID NO: 1515 - DNA, 20 bp, Artificial sequence
  Synthetic oligonucleotide
aaccgagcaagccccgcccc

SEQ ID NO: 1516 - DNA, 20 bp, Artificial sequence
  Synthetic oligonucleotide
gaggacggctggggcgggga

SEQ ID NO: 1517 - DNA, 20 bp, Artificial sequence
  Synthetic oligonucleotide
tttctagaggcccctgagct

SEQ ID NO: 1518 - DNA, 20 bp, Artificial sequence
  Synthetic oligonucleotide
tccccaccccaccttctagc

SEQ ID NO: 1519 - DNA, 20 bp, Artificial sequence
  Synthetic oligonucleotide
attgtcgctgggcacagggg

SEQ ID NO: 1520 - DNA, 20 bp, Artificial sequence
  Synthetic oligonucleotide
gccgcccccaacccattccc

SEQ ID NO: 1521 - DNA, 20 bp, Artificial sequence
  Synthetic oligonucleotide
cacattctaagctccaacct

SEQ ID NO: 1522 - DNA, 20 bp, Artificial sequence
  Synthetic oligonucleotide
gcaatgcattagaaacctct

SEQ ID NO: 1523 - DNA, 20 bp, Artificial sequence
  Synthetic oligonucleotide
attcactatctgcctgcaat

SEQ ID NO: 1524 - DNA, 20 bp, Artificial sequence
  Synthetic oligonucleotide
tcattctcccttcacattct

SEQ ID NO: 1525 - DNA, 20 bp, Artificial sequence
  Synthetic oligonucleotide
tcctcctgcacctgctcaga

SEQ ID NO: 1526 - DNA, 20 bp, Artificial sequence
  Synthetic oligonucleotide
tgaaacttggtgaatcttta

SEQ ID NO: 1527 - DNA, 20 bp, Artificial sequence
  Synthetic oligonucleotide
ggggtcgcatggctgcaggc

SEQ ID NO: 1528 - DNA, 20 bp, Artificial sequence
  Synthetic oligonucleotide
ccagtgccagttcccagcgc

SEQ ID NO: 1529 - DNA, 20 bp, Artificial sequence
  Synthetic oligonucleotide
ctccaccttggcctggcatc

SEQ ID NO: 1530 - DNA, 20 bp, Artificial sequence
  Synthetic oligonucleotide
tatgtatttataaacagggt

SEQ ID NO: 1531 - DNA, 20 bp, Artificial sequence
  Synthetic oligonucleotide
gtggagtcctgctatggctt

SEQ ID NO: 1532 - DNA, 20 bp, Artificial sequence
  Synthetic oligonucleotide
atgtatttataaacagggtc

SEQ ID NO: 1533 - DNA, 20 bp, Artificial sequence
  Synthetic oligonucleotide
acattctaagctccaacctc

SEQ ID NO: 1534 - DNA, 20 bp, Artificial sequence
  Synthetic oligonucleotide
aataaagatcacagctgccc

SEQ ID NO: 1535 - DNA, 20 bp, Artificial sequence
  Synthetic oligonucleotide
aggaggcacggggtggcgtg

SEQ ID NO: 1536 - DNA, 20 bp, Artificial sequence
  Synthetic oligonucleotide
ccaggttagccttccaagcc

SEQ ID NO: 1537 - DNA, 20 bp, Artificial sequence
  Synthetic oligonucleotide
acttggaaagcattatgtat

SEQ ID NO: 1538 - DNA, 20 bp, Artificial sequence
  Synthetic oligonucleotide
tgtcgctgggcacaggggcg

SEQ ID NO: 1539 - DNA, 20 bp, Artificial sequence
  Synthetic oligonucleotide
ctcattttaaagttctccaa

SEQ ID NO: 1540 - DNA, 20 bp, Artificial sequence
  Synthetic oligonucleotide
gctgcaggctgcgcggaggc

SEQ ID NO: 1541 - DNA, 20 bp, Artificial sequence
  Synthetic oligonucleotide
gggtcgcatggctgcaggct

SEQ ID NO: 1542 - DNA, 20 bp, Artificial sequence
  Synthetic oligonucleotide
tcttccaccaggggctcgaa

SEQ ID NO: 1543 - DNA, 20 bp, Artificial sequence
  Synthetic oligonucleotide
gctaattcagtcctcatttt

SEQ ID NO: 1544 - DNA, 20 bp, Artificial sequence
  Synthetic oligonucleotide
accgagcaagccccgccccc

SEQ ID NO: 1545 - DNA, 20 bp, Artificial sequence
  Synthetic oligonucleotide
gcctccatagaaaattccat

SEQ ID NO: 1546 - DNA, 20 bp, Artificial sequence
  Synthetic oligonucleotide
tctaactcctatctcaagga

SEQ ID NO: 1547 - DNA, 20 bp, Artificial sequence
  Synthetic oligonucleotide
tgagctcatccccgtgcccc

SEQ ID NO: 1548 - DNA, 20 bp, Artificial sequence
  Synthetic oligonucleotide
acccaggccccccaagactt

SEQ ID NO: 1549 - DNA, 20 bp, Artificial sequence
  Synthetic oligonucleotide
aaactagggtccaccccagg

SEQ ID NO: 1550 - DNA, 20 bp, Artificial sequence
  Synthetic oligonucleotide
ttcatcttcctgcctgtgat

SEQ ID NO: 1551 - DNA, 20 bp, Artificial sequence
  Synthetic oligonucleotide
cccagcccttcccaggtcca

SEQ ID NO: 1552 - DNA, 20 bp, Artificial sequence
  Synthetic oligonucleotide
gttccatctcagtcccagtc

SEQ ID NO: 1553 - DNA, 20 bp, Artificial sequence
  Synthetic oligonucleotide
atctccccatccccaggtcg

SEQ ID NO: 1554 - DNA, 20 bp, Artificial sequence
  Synthetic oligonucleotide
gcgctggccgctctgccact

SEQ ID NO: 1555 - DNA, 20 bp, Artificial sequence
  Synthetic oligonucleotide
gcgctggtgcccacggcagc

SEQ ID NO: 1556 - DNA, 20 bp, Artificial sequence
  Synthetic oligonucleotide
cctcctgcacctgctcagac

SEQ ID NO: 1557 - DNA, 20 bp, Artificial sequence
  Synthetic oligonucleotide
gtgctccacaaatgcttctt

SEQ ID NO: 1558 - DNA, 20 bp, Artificial sequence
  Synthetic oligonucleotide
ccgctcctcctctccccaag

SEQ ID NO: 1559 - DNA, 20 bp, Artificial sequence
  Synthetic oligonucleotide
ttctagaggcccctgagctc

SEQ ID NO: 1560 - DNA, 20 bp, Artificial sequence
  Synthetic oligonucleotide
taatcccagcacatttacca

SEQ ID NO: 1561 - DNA, 20 bp, Artificial sequence
  Synthetic oligonucleotide
ccagtctcgcattcctcatt

SEQ ID NO: 1562 - DNA, 20 bp, Artificial sequence
  Synthetic oligonucleotide
tcggcgttcagtgattgtcg

SEQ ID NO: 1563 - DNA, 20 bp, Artificial sequence
  Synthetic oligonucleotide
ctgcccctggctccccagtt

SEQ ID NO: 1564 - DNA, 20 bp, Artificial sequence
  Synthetic oligonucleotide
gaaacttggtgaatctttat

SEQ ID NO: 1565 - DNA, 20 bp, Artificial sequence
  Synthetic oligonucleotide
ttaactccctcctggtcttc

SEQ ID NO: 1566 - DNA, 20 bp, Artificial sequence
  Synthetic oligonucleotide
caaaacaacttctaactcct

SEQ ID NO: 1567 - DNA, 20 bp, Artificial sequence
  Synthetic oligonucleotide
caaattccatccccccaccc

SEQ ID NO: 1568 - DNA, 20 bp, Artificial sequence
  Synthetic oligonucleotide
gaaacctctaactcccagcc

SEQ ID NO: 1569 - DNA, 20 bp, Artificial sequence
  Synthetic oligonucleotide
cggcccactggcgctgcatg

SEQ ID NO: 1570 - DNA, 20 bp, Artificial sequence
  Synthetic oligonucleotide
aaaattccatcttcctctcc

SEQ ID NO: 1571 - DNA, 20 bp, Artificial sequence
  Synthetic oligonucleotide
gcgcggaggcaggaggcacg

SEQ ID NO: 1572 - DNA, 20 bp, Artificial sequence
  Synthetic oligonucleotide
agggtctcccgctgcaggct

SEQ ID NO: 1573 - DNA, 20 bp, Artificial sequence
  Synthetic oligonucleotide
actatctgcctgcaatgcat

SEQ ID NO: 1574 - DNA, 20 bp, Artificial sequence
  Synthetic oligonucleotide
ctgtctccaccgcttgctcc

SEQ ID NO: 1575 - DNA, 20 bp, Artificial sequence
  Synthetic oligonucleotide
ccccaagcccgaccccgagt

SEQ ID NO: 1576 - DNA, 20 bp, Artificial sequence
  Synthetic oligonucleotide
aatctttattaaactagggt

SEQ ID NO: 1577 - DNA, 20 bp, Artificial sequence
  Synthetic oligonucleotide
ctcgggctccggctctgtct

SEQ ID NO: 1578 - DNA, 20 bp, Artificial sequence
  Synthetic oligonucleotide
cccattccctatttaactcc

SEQ ID NO: 1579 - DNA, 20 bp, Artificial sequence
  Synthetic oligonucleotide
ctgcaccttctccaccagcc

SEQ ID NO: 1580 - DNA, 20 bp, Artificial sequence
  Synthetic oligonucleotide
tcaaccgccagtgaggactc

SEQ ID NO: 1581 - DNA, 20 bp, Artificial sequence
  Synthetic oligonucleotide
catcccagtccagctgctct

SEQ ID NO: 1582 - DNA, 20 bp, Artificial sequence
  Synthetic oligonucleotide
ccccaccccaccttctagcg

SEQ ID NO: 1583 - DNA, 20 bp, Artificial sequence
  Synthetic oligonucleotide
ccagtcccctgctgcttgcc

SEQ ID NO: 1584 - DNA, 20 bp, Artificial sequence
  Synthetic oligonucleotide
ccaccccaggaggacggctg

SEQ ID NO: 1585 - DNA, 20 bp, Artificial sequence
  Synthetic oligonucleotide
ccgtgttccatttatgagct

SEQ ID NO: 1586 - DNA, 20 bp, Artificial sequence
  Synthetic oligonucleotide
tggtcttctcttatctcccc

SEQ ID NO: 1587 - DNA, 20 bp, Artificial sequence
  Synthetic oligonucleotide
caatgcattagaaacctcta

SEQ ID NO: 1588 - DNA, 20 bp, Artificial sequence
  Synthetic oligonucleotide
gcttgcctcacccccgctcc

SEQ ID NO: 1589 - DNA, 20 bp, Artificial sequence
  Synthetic oligonucleotide
tcccagggtcccagctcttt

SEQ ID NO: 1590 - DNA, 20 bp, Artificial sequence
  Synthetic oligonucleotide
gctgcaggcttcggcgttca

SEQ ID NO: 1591 - DNA, 20 bp, Artificial sequence
  Synthetic oligonucleotide
cttggcctggcatcctgtgt

SEQ ID NO: 1592 - DNA, 20 bp, Artificial sequence
  Synthetic oligonucleotide
ccccgcccccatacctgcca

SEQ ID NO: 1593 - DNA, 20 bp, Artificial sequence
  Synthetic oligonucleotide
gcccacagaaccttcatctt

SEQ ID NO: 1594 - DNA, 20 bp, Artificial sequence
  Synthetic oligonucleotide
cccccagcccggccccaacc

SEQ ID NO: 1595 - DNA, 20 bp, Artificial sequence
  Synthetic oligonucleotide
ttgttgcattatctgcaaca

SEQ ID NO: 1596 - DNA, 20 bp, Artificial sequence
  Synthetic oligonucleotide
cccaacccggcctcacccca

SEQ ID NO: 1597 - DNA, 20 bp, Artificial sequence
  Synthetic oligonucleotide
gaaccagcagagacccaggc

SEQ ID NO: 1598 - DNA, 20 bp, Artificial sequence
  Synthetic oligonucleotide
gtcctgctatggcttacatc

SEQ ID NO: 1599 - DNA, 20 bp, Artificial sequence
  Synthetic oligonucleotide
ccagcggaaaagcatgtatt

SEQ ID NO: 1600 - DNA, 20 bp, Artificial sequence
  Synthetic oligonucleotide
gggtggcgtggggtcgcatg

SEQ ID NO: 1601 - DNA, 20 bp, Artificial sequence
  Synthetic oligonucleotide
tgcaacagcctaatcccagc

SEQ ID NO: 1602 - DNA, 20 bp, Artificial sequence
  Synthetic oligonucleotide
tacctgccaggaatgtgacc

SEQ ID NO: 1603 - DNA, 20 bp, Artificial sequence
  Synthetic oligonucleotide
gggcggggacagggtctccc

SEQ ID NO: 1604 - DNA, 20 bp, Artificial sequence
  Synthetic oligonucleotide
ggacactcacctcagttcct

SEQ ID NO: 1605 - DNA, 20 bp, Artificial sequence
  Synthetic oligonucleotide
cattctcccttcacattcta

SEQ ID NO: 1606 - DNA, 20 bp, Artificial sequence
  Synthetic oligonucleotide
ccgcccccaacccattccct

SEQ ID NO: 1607 - DNA, 20 bp, Artificial sequence
  Synthetic oligonucleotide
aggacggctggggcggggac

SEQ ID NO: 1608 - DNA, 20 bp, Artificial sequence
  Synthetic oligonucleotide
agagagctaaagccaggagt

SEQ ID NO: 1609 - DNA, 20 bp, Artificial sequence
  Synthetic oligonucleotide
ctatctgcctgcaatgcatt

SEQ ID NO: 1610 - DNA, 20 bp, Artificial sequence
  Synthetic oligonucleotide
cccaagcccgaccccgagta

SEQ ID NO: 1611 - DNA, 20 bp, Artificial sequence
  Synthetic oligonucleotide
ggtggcgtggggtcgcatgg

SEQ ID NO: 1612 - DNA, 20 bp, Artificial sequence
  Synthetic oligonucleotide
caacccggcctcaccccagg

SEQ ID NO: 1613 - DNA, 20 bp, Artificial sequence
  Synthetic oligonucleotide
cgctcctcctctccccaagc

SEQ ID NO: 1614 - DNA, 20 bp, Artificial sequence
  Synthetic oligonucleotide
ctccccatccccaggtcggc

SEQ ID NO: 1615 - DNA, 20 bp, Artificial sequence
  Synthetic oligonucleotide
cattctaagctccaacctca

SEQ ID NO: 1616 - DNA, 20 bp, Artificial sequence
  Synthetic oligonucleotide
atcctgccaggaatgtgacc

SEQ ID NO: 1617 - DNA, 20 bp, Artificial sequence
  Synthetic oligonucleotide
aaattccatcttcctctccc

SEQ ID NO: 1618 - DNA, 20 bp, Artificial sequence
  Synthetic oligonucleotide
ccagcccttcccaggtccag

SEQ ID NO: 1619 - DNA, 20 bp, Artificial sequence
  Synthetic oligonucleotide
gagagctaaagccaggagtc

SEQ ID NO: 1620 - DNA, 20 bp, Artificial sequence
  Synthetic oligonucleotide
ctcctgcacctgctcagaca

SEQ ID NO: 1621 - DNA, 20 bp, Artificial sequence
  Synthetic oligonucleotide
ataaagatcacagctgcccc

SEQ ID NO: 1622 - DNA, 20 bp, Artificial sequence
  Synthetic oligonucleotide
ttccatctcagtcccagtct

SEQ ID NO: 1623 - DNA, 20 bp, Artificial sequence
  Synthetic oligonucleotide
gagctcatccccgtgccccc

SEQ ID NO: 1624 - DNA, 20 bp, Artificial sequence
  Synthetic oligonucleotide
acactcacctcagttcctgg

SEQ ID NO: 1625 - DNA, 20 bp, Artificial sequence
  Synthetic oligonucleotide
aaccagcagagacccaggcc

SEQ ID NO: 1626 - DNA, 20 bp, Artificial sequence
  Synthetic oligonucleotide
tcgggctccggctctgtctc

SEQ ID NO: 1627 - DNA, 20 bp, Artificial sequence
  Synthetic oligonucleotide
ctgcaggcttcggcgttcag

SEQ ID NO: 1628 - DNA, 20 bp, Artificial sequence
  Synthetic oligonucleotide
cgcggaggcaggaggcacgg

SEQ ID NO: 1629 - DNA, 20 bp, Artificial sequence
  Synthetic oligonucleotide
ccgagcaagccccgccccca

SEQ ID NO: 1630 - DNA, 20 bp, Artificial sequence
  Synthetic oligonucleotide
ctaattcagtcctcatttta

SEQ ID NO: 1631 - DNA, 20 bp, Artificial sequence
  Synthetic oligonucleotide
ggtcagggtccttctgaccc

SEQ ID NO: 1632 - DNA, 20 bp, Artificial sequence
  Synthetic oligonucleotide
gttgcattatctgcaacagc

SEQ ID NO: 1633 - DNA, 20 bp, Artificial sequence
  Synthetic oligonucleotide
cggcgttcagtgattgtcgc

SEQ ID NO: 1634 - DNA, 20 bp, Artificial sequence
  Synthetic oligonucleotide
tctagaggcccctgagctca

SEQ ID NO: 1635 - DNA, 20 bp, Artificial sequence
  Synthetic oligonucleotide
gttccatttatgagctaatt

SEQ ID NO: 1636 - DNA, 20 bp, Artificial sequence
  Synthetic oligonucleotide
gctggccgctctgccactcg

SEQ ID NO: 1637 - DNA, 20 bp, Artificial sequence
  Synthetic oligonucleotide
aatgcattagaaacctctaa

SEQ ID NO: 1638 - DNA, 20 bp, Artificial sequence
  Synthetic oligonucleotide
tcattttaaagttctccaat

SEQ ID NO: 1639 - DNA, 20 bp, Artificial sequence
  Synthetic oligonucleotide
ccattccctatttaactccc

SEQ ID NO: 1640 - DNA, 20 bp, Artificial sequence
  Synthetic oligonucleotide
caggttagccttccaagcct

SEQ ID NO: 1641 - DNA, 20 bp, Artificial sequence
  Synthetic oligonucleotide
cccaccccaccttctagcgg

SEQ ID NO: 1642 - DNA, 20 bp, Artificial sequence
  Synthetic oligonucleotide
ctaactcctatctcaaggat

SEQ ID NO: 1643 - DNA, 20 bp, Artificial sequence
  Synthetic oligonucleotide
aaaacaacttctaactccta

SEQ ID NO: 1644 - DNA, 20 bp, Artificial sequence
  Synthetic oligonucleotide
aatcccagcacatttaccaa

SEQ ID NO: 1645 - DNA, 20 bp, Artificial sequence
  Synthetic oligonucleotide
ttccaccaggggctcgaacc

SEQ ID NO: 1646 - DNA, 20 bp, Artificial sequence
  Synthetic oligonucleotide
cttggaaagcattatgtatt

SEQ ID NO: 1647 - DNA, 20 bp, Artificial sequence
  Synthetic oligonucleotide
tgtctccaccgcttgctcca

SEQ ID NO: 1648 - DNA, 20 bp, Artificial sequence
  Synthetic oligonucleotide
tgcccctggctccccagtta

SEQ ID NO: 1649 - DNA, 20 bp, Artificial sequence
  Synthetic oligonucleotide
cagtctcgcattcctcattc

SEQ ID NO: 1650 - DNA, 20 bp, Artificial sequence
  Synthetic oligonucleotide
caccccaggaggacggctgg

SEQ ID NO: 1651 - DNA, 20 bp, Artificial sequence
  Synthetic oligonucleotide
tgtatttataaacagggtct

SEQ ID NO: 1652 - DNA, 20 bp, Artificial sequence
  Synthetic oligonucleotide
cgcccccaacccattcccta

SEQ ID NO: 1653 - DNA, 20 bp, Artificial sequence
  Synthetic oligonucleotide
gggtctcccgctgcaggctg

SEQ ID NO: 1654 - DNA, 20 bp, Artificial sequence
  Synthetic oligonucleotide
gctggtgcccacggcagcct

SEQ ID NO: 1655 - DNA, 20 bp, Artificial sequence
  Synthetic oligonucleotide
cccagcccggccccaacccg

SEQ ID NO: 1656 - DNA, 20 bp, Artificial sequence
  Synthetic oligonucleotide
tgctccacaaatgcttcttt

SEQ ID NO: 1657 - DNA, 20 bp, Artificial sequence
  Synthetic oligonucleotide
taactccctcctggtcttct

SEQ ID NO: 1658 - DNA, 20 bp, Artificial sequence
  Synthetic oligonucleotide
cgccagtgaggactcctccc

SEQ ID NO: 1659 - DNA, 20 bp, Artificial sequence
  Synthetic oligonucleotide
cccacagaaccttcatcttc

SEQ ID NO: 1660 - DNA, 20 bp, Artificial sequence
  Synthetic oligonucleotide
ggacggctggggcggggaca

SEQ ID NO: 1661 - DNA, 20 bp, Artificial sequence
  Synthetic oligonucleotide
attctcccttcacattctaa

SEQ ID NO: 1662 - DNA, 20 bp, Artificial sequence
  Synthetic oligonucleotide
cctccatagaaaattccatc

SEQ ID NO: 1663 - DNA, 20 bp, Artificial sequence
  Synthetic oligonucleotide
atcccagtccagctgctctc

SEQ ID NO: 1664 - DNA, 20 bp, Artificial sequence
  Synthetic oligonucleotide
aaacctctaactcccagcca

SEQ ID NO: 1665 - DNA, 20 bp, Artificial sequence
  Synthetic oligonucleotide
ggcggggacagggtctcccg

SEQ ID NO: 1666 - DNA, 20 bp, Artificial sequence
  Synthetic oligonucleotide
tcgctgggcacaggggcggc

SEQ ID NO: 1667 - DNA, 20 bp, Artificial sequence
  Synthetic oligonucleotide
cttgcctcacccccgctcct

SEQ ID NO: 1668 - DNA, 20 bp, Artificial sequence
  Synthetic oligonucleotide
gcccactggcgctgcatgtc

SEQ ID NO: 1669 - DNA, 20 bp, Artificial sequence
  Synthetic oligonucleotide
cctgctatggcttacatccc

SEQ ID NO: 1670 - DNA, 20 bp, Artificial sequence
  Synthetic oligonucleotide
cccaggccccccaagactta

SEQ ID NO: 1671 - DNA, 20 bp, Artificial sequence
  Synthetic oligonucleotide
gcaacagcctaatcccagca

SEQ ID NO: 1672 - DNA, 20 bp, Artificial sequence
  Synthetic oligonucleotide
cttggcctggcatcctgcca

SEQ ID NO: 1673 - DNA, 20 bp, Artificial sequence
  Synthetic oligonucleotide
tcatcttcctgcctgtgatt

SEQ ID NO: 1674 - DNA, 20 bp, Artificial sequence
  Synthetic oligonucleotide
ctgcaggctgcgcggaggca

SEQ ID NO: 1675 - DNA, 20 bp, Artificial sequence
  Synthetic oligonucleotide
ggaggcacggggtggcgtgg

SEQ ID NO: 1676 - DNA, 20 bp, Artificial sequence
  Synthetic oligonucleotide
gcaccttctccaccagcccg

SEQ ID NO: 1677 - DNA, 20 bp, Artificial sequence
  Synthetic oligonucleotide
ttccatccccccaccccctc

SEQ ID NO: 1678 - DNA, 20 bp, Artificial sequence
  Synthetic oligonucleotide
atctttattaaactagggtc

SEQ ID NO: 1679 - DNA, 20 bp, Artificial sequence
  Synthetic oligonucleotide
aaacttggtgaatctttatt

SEQ ID NO: 1680 - DNA, 20 bp, Artificial sequence
  Synthetic oligonucleotide
cagtcccctgctgcttgcct

SEQ ID NO: 1681 - DNA, 20 bp, Artificial sequence
  Synthetic oligonucleotide
ggtcttctcttatctcccca

SEQ ID NO: 1682 - DNA, 20 bp, Artificial sequence
  Synthetic oligonucleotide
actcacctcagttcctgggt

SEQ ID NO: 1683 - DNA, 20 bp, Artificial sequence
  Synthetic oligonucleotide
ggcgttcagtgattgtcgct

SEQ ID NO: 1684 - DNA, 20 bp, Artificial sequence
  Synthetic oligonucleotide
agtctcgcattcctcattct

SEQ ID NO: 1685 - DNA, 20 bp, Artificial sequence
  Synthetic oligonucleotide
ttggaaagcattatgtattt

SEQ ID NO: 1686 - DNA, 20 bp, Artificial sequence
  Synthetic oligonucleotide
ttgcattatctgcaacagcc

SEQ ID NO: 1687 - DNA, 20 bp, Artificial sequence
  Synthetic oligonucleotide
gtcttctcttatctccccat

SEQ ID NO: 1688 - DNA, 20 bp, Artificial sequence
  Synthetic oligonucleotide
ttgcctcacccccgctcctc

SEQ ID NO: 1689 - DNA, 20 bp, Artificial sequence
  Synthetic oligonucleotide
ccacagaaccttcatcttcc

SEQ ID NO: 1690 - DNA, 20 bp, Artificial sequence
  Synthetic oligonucleotide
gcggaggcaggaggcacggg

SEQ ID NO: 1691 - DNA, 20 bp, Artificial sequence
  Synthetic oligonucleotide
cccgcccccatacctgccag

SEQ ID NO: 1692 - DNA, 20 bp, Artificial sequence
  Synthetic oligonucleotide
aacccggcctcaccccaggt

SEQ ID NO: 1693 - DNA, 20 bp, Artificial sequence
  Synthetic oligonucleotide
tggtgcccacggcagcctgc

SEQ ID NO: 1694 - DNA, 20 bp, Artificial sequence
  Synthetic oligonucleotide
ctgctatggcttacatccca

SEQ ID NO: 1695 - DNA, 20 bp, Artificial sequence
  Synthetic oligonucleotide
aacttggtgaatctttatta

SEQ ID NO: 1696 - DNA, 20 bp, Artificial sequence
  Synthetic oligonucleotide
aggttagccttccaagcctt

SEQ ID NO: 1697 - DNA, 20 bp, Artificial sequence
  Synthetic oligonucleotide
atgcattagaaacctctaac

SEQ ID NO: 1698 - DNA, 20 bp, Artificial sequence
  Synthetic oligonucleotide
cattttaaagttctccaatc

SEQ ID NO: 1699 - DNA, 20 bp, Artificial sequence
  Synthetic oligonucleotide
ccaggagtcagaaatgggaa

SEQ ID NO: 1700 - DNA, 20 bp, Artificial sequence
  Synthetic oligonucleotide
acctgccaggaatgtgacca

SEQ ID NO: 1701 - DNA, 20 bp, Artificial sequence
  Synthetic oligonucleotide
tctttattaaactagggtcc

SEQ ID NO: 1702 - DNA, 20 bp, Artificial sequence
  Synthetic oligonucleotide
tggccgctctgccactcggt

SEQ ID NO: 1703 - DNA, 20 bp, Artificial sequence
  Synthetic oligonucleotide
agtcccctgctgcttgcctc

SEQ ID NO: 1704 - DNA, 20 bp, Artificial sequence
  Synthetic oligonucleotide
aacctctaactcccagccag

SEQ ID NO: 1705 - DNA, 20 bp, Artificial sequence
  Synthetic oligonucleotide
tctcccttcacattctaagc

SEQ ID NO: 1706 - DNA, 20 bp, Artificial sequence
  Synthetic oligonucleotide
ccaggccccccaagacttag

SEQ ID NO: 1707 - DNA, 20 bp, Artificial sequence
  Synthetic oligonucleotide
ccagggtcccagctctttct

SEQ ID NO: 1708 - DNA, 20 bp, Artificial sequence
  Synthetic oligonucleotide
tgcacctgctcagacagtgt

SEQ ID NO: 1709 - DNA, 20 bp, Artificial sequence
  Synthetic oligonucleotide
ggctccggctctgtctccac

SEQ ID NO: 1710 - DNA, 20 bp, Artificial sequence
  Synthetic oligonucleotide
gcccttcccaggtccagtcc

SEQ ID NO: 1711 - DNA, 20 bp, Artificial sequence
  Synthetic oligonucleotide
taattcagtcctcattttaa

SEQ ID NO: 1712 - DNA, 20 bp, Artificial sequence
  Synthetic oligonucleotide
accagcagagacccaggccc

SEQ ID NO: 1713 - DNA, 20 bp, Artificial sequence
  Synthetic oligonucleotide
tgcaggctgcgcggaggcag

SEQ ID NO: 1714 - DNA, 20 bp, Artificial sequence
  Synthetic oligonucleotide
gccagtgaggactcctccca

SEQ ID NO: 1715 - DNA, 20 bp, Artificial sequence
  Synthetic oligonucleotide
ccaccaggggctcgaaccag

SEQ ID NO: 1716 - DNA, 20 bp, Artificial sequence
  Synthetic oligonucleotide
gtatttataaacagggtctt

SEQ ID NO: 1717 - DNA, 20 bp, Artificial sequence
  Synthetic oligonucleotide
gacggctggggcggggacag

SEQ ID NO: 1718 - DNA, 20 bp, Artificial sequence
  Synthetic oligonucleotide
actccctcctggtcttctct

SEQ ID NO: 1719 - DNA, 20 bp, Artificial sequence
  Synthetic oligonucleotide
cgagcaagccccgcccccat

SEQ ID NO: 1720 - DNA, 20 bp, Artificial sequence
  Synthetic oligonucleotide
ccactggcgctgcatgtctt

SEQ ID NO: 1721 - DNA, 20 bp, Artificial sequence
  Synthetic oligonucleotide
ggtgatggagaataaagatc

SEQ ID NO: 1722 - DNA, 20 bp, Artificial sequence
  Synthetic oligonucleotide
gctgggcacaggggcggcgc

SEQ ID NO: 1723 - DNA, 20 bp, Artificial sequence
  Synthetic oligonucleotide
cccagtccagctgctctccc

SEQ ID NO: 1724 - DNA, 20 bp, Artificial sequence
  Synthetic oligonucleotide
atcccagcacatttaccaag

SEQ ID NO: 1725 - DNA, 20 bp, Artificial sequence
  Synthetic oligonucleotide
aattccatcttcctctcccg

SEQ ID NO: 1726 - DNA, 20 bp, Artificial sequence
  Synthetic oligonucleotide
gaggcacggggtggcgtggg

SEQ ID NO: 1727 - DNA, 20 bp, Artificial sequence
  Synthetic oligonucleotide
attctaagctccaacctcac

SEQ ID NO: 1728 - DNA, 20 bp, Artificial sequence
  Synthetic oligonucleotide
gtcagggtccttctgacccc

SEQ ID NO: 1729 - DNA, 20 bp, Artificial sequence
  Synthetic oligonucleotide
ccaccccctccccaccgccg

SEQ ID NO: 1730 - DNA, 20 bp, Artificial sequence
  Synthetic oligonucleotide
ttcagagccaggaagcagca

SEQ ID NO: 1731 - DNA, 20 bp, Artificial sequence
  Synthetic oligonucleotide
tgcaggcttcggcgttcagt

SEQ ID NO: 1732 - DNA, 20 bp, Artificial sequence
  Synthetic oligonucleotide
gcggggacagggtctcccgc

SEQ ID NO: 1733 - DNA, 20 bp, Artificial sequence
  Synthetic oligonucleotide
atcacagctgccccgtgtct

SEQ ID NO: 1734 - DNA, 20 bp, Artificial sequence
  Synthetic oligonucleotide
cttcctgcctgtgattggcc

SEQ ID NO: 1735 - DNA, 20 bp, Artificial sequence
  Synthetic oligonucleotide
actagggtccaccccaggag

SEQ ID NO: 1736 - DNA, 20 bp, Artificial sequence
  Synthetic oligonucleotide
ctcatccccgtgcccccgac

SEQ ID NO: 1737 - DNA, 20 bp, Artificial sequence
  Synthetic oligonucleotide
tccccatccccaggtcggcc

SEQ ID NO: 1738 - DNA, 20 bp, Artificial sequence
  Synthetic oligonucleotide
gagtagctctcctgagacta

SEQ ID NO: 1739 - DNA, 20 bp, Artificial sequence
  Synthetic oligonucleotide
gcccctggctccccagttat

SEQ ID NO: 1740 - DNA, 20 bp, Artificial sequence
  Synthetic oligonucleotide
ctagaggcccctgagctcat

SEQ ID NO: 1741 - DNA, 20 bp, Artificial sequence
  Synthetic oligonucleotide
cagcccggccccaacccggc

SEQ ID NO: 1742 - DNA, 20 bp, Artificial sequence
  Synthetic oligonucleotide
tctgcctgcaatgcattaga

SEQ ID NO: 1743 - DNA, 20 bp, Artificial sequence
  Synthetic oligonucleotide
ctccaccgcttgctccacct

SEQ ID NO: 1744 - DNA, 20 bp, Artificial sequence
  Synthetic oligonucleotide
gtggcgtggggtcgcatggc

SEQ ID NO: 1745 - DNA, 20 bp, Artificial sequence
  Synthetic oligonucleotide
cacaaatgcttctttggagc

SEQ ID NO: 1746 - DNA, 20 bp, Artificial sequence
  Synthetic oligonucleotide
ggtctcccgctgcaggctgc

SEQ ID NO: 1747 - DNA, 20 bp, Artificial sequence
  Synthetic oligonucleotide
tccatctcagtcccagtctc

SEQ ID NO: 1748 - DNA, 20 bp, Artificial sequence
  Synthetic oligonucleotide
ctccatagaaaattccatct

SEQ ID NO: 1749 - DNA, 20 bp, Artificial sequence
  Synthetic oligonucleotide
aaacaacttctaactcctat

SEQ ID NO: 1750 - DNA, 20 bp, Artificial sequence
  Synthetic oligonucleotide
ttccatttatgagctaattc

SEQ ID NO: 1751 - DNA, 20 bp, Artificial sequence
  Synthetic oligonucleotide
ccaccccaccttctagcggg

SEQ ID NO: 1752 - DNA, 20 bp, Artificial sequence
  Synthetic oligonucleotide
gcccccaacccattccctat

SEQ ID NO: 1753 - DNA, 20 bp, Artificial sequence
  Synthetic oligonucleotide
cattccctatttaactccct

SEQ ID NO: 1754 - DNA, 20 bp, Artificial sequence
  Synthetic oligonucleotide
gctcctcctctccccaagcc

SEQ ID NO: 1755 - DNA, 20 bp, Artificial sequence
  Synthetic oligonucleotide
caacagcctaatcccagcac

SEQ ID NO: 1756 - DNA, 20 bp, Artificial sequence
  Synthetic oligonucleotide
accttctccaccagcccggc

SEQ ID NO: 1757 - DNA, 20 bp, Artificial sequence
  Synthetic oligonucleotide
ccccaggaggacggctgggg

SEQ ID NO: 1758 - DNA, 20 bp, Artificial sequence
  Synthetic oligonucleotide
ctgcctgcaatgcattagaa

SEQ ID NO: 1759 - DNA, 20 bp, Artificial sequence
  Synthetic oligonucleotide
agaggcccctgagctcatcc

SEQ ID NO: 1760 - DNA, 20 bp, Artificial sequence
  Synthetic oligonucleotide
gcgttcagtgattgtcgctg

SEQ ID NO: 1761 - DNA, 20 bp, Artificial sequence
  Synthetic oligonucleotide
ccagtgaggactcctcccac

SEQ ID NO: 1762 - DNA, 20 bp, Artificial sequence
  Synthetic oligonucleotide
gtgatggagaataaagatca

SEQ ID NO: 1763 - DNA, 20 bp, Artificial sequence
  Synthetic oligonucleotide
ttctaagctccaacctcaca

SEQ ID NO: 1764 - DNA, 20 bp, Artificial sequence
  Synthetic oligonucleotide
tgcattagaaacctctaact

SEQ ID NO: 1765 - DNA, 20 bp, Artificial sequence
  Synthetic oligonucleotide
ccctgctgcttgcctcaccc

SEQ ID NO: 1766 - DNA, 20 bp, Artificial sequence
  Synthetic oligonucleotide
ccagtccagctgctctcccc

SEQ ID NO: 1767 - DNA, 20 bp, Artificial sequence
  Synthetic oligonucleotide
tcctcctctccccaagcccg

SEQ ID NO: 1768 - DNA, 20 bp, Artificial sequence
  Synthetic oligonucleotide
agcccggccccaacccggcc

SEQ ID NO: 1769 - DNA, 20 bp, Artificial sequence
  Synthetic oligonucleotide
ccgcccccatacctgccagg

SEQ ID NO: 1770 - DNA, 20 bp, Artificial sequence
  Synthetic oligonucleotide
cagcaacgcagcccacagaa

SEQ ID NO: 1771 - DNA, 20 bp, Artificial sequence
  Synthetic oligonucleotide
cccccaacccattccctatt

SEQ ID NO: 1772 - DNA, 20 bp, Artificial sequence
  Synthetic oligonucleotide
ccccgtgcccccgactgcgc

SEQ ID NO: 1773 - DNA, 20 bp, Artificial sequence
  Synthetic oligonucleotide
attccctatttaactccctc

SEQ ID NO: 1774 - DNA, 20 bp, Artificial sequence
  Synthetic oligonucleotide
tggaaagcattatgtattta

SEQ ID NO: 1775 - DNA, 20 bp, Artificial sequence
  Synthetic oligonucleotide
gagcaagccccgcccccata

SEQ ID NO: 1776 - DNA, 20 bp, Artificial sequence
  Synthetic oligonucleotide
ttagccttccaagccttgtt

SEQ ID NO: 1777 - DNA, 20 bp, Artificial sequence
  Synthetic oligonucleotide
agctgagcagctcctcctgc

SEQ ID NO: 1778 - DNA, 20 bp, Artificial sequence
  Synthetic oligonucleotide
cctctaactcccagccaggt

SEQ ID NO: 1779 - DNA, 20 bp, Artificial sequence
  Synthetic oligonucleotide
agggtccttctgaccccgtc

SEQ ID NO: 1780 - DNA, 20 bp, Artificial sequence
  Synthetic oligonucleotide
acggctggggcggggacagg

SEQ ID NO: 1781 - DNA, 20 bp, Artificial sequence
  Synthetic oligonucleotide
catctcagtcccagtctcgc

SEQ ID NO: 1782 - DNA, 20 bp, Artificial sequence
  Synthetic oligonucleotide
aacagcctaatcccagcaca

SEQ ID NO: 1783 - DNA, 20 bp, Artificial sequence
  Synthetic oligonucleotide
acccggcctcaccccaggtt

SEQ ID NO: 1784 - DNA, 20 bp, Artificial sequence
  Synthetic oligonucleotide
ctagggtccaccccaggagg

SEQ ID NO: 1785 - DNA, 20 bp, Artificial sequence
  Synthetic oligonucleotide
acaaatgcttctttggagcc

SEQ ID NO: 1786 - DNA, 20 bp, Artificial sequence
  Synthetic oligonucleotide
agtagctctcctgagactac

SEQ ID NO: 1787 - DNA, 20 bp, Artificial sequence
  Synthetic oligonucleotide
attccatcttcctctcccgg

SEQ ID NO: 1788 - DNA, 20 bp, Artificial sequence
  Synthetic oligonucleotide
tgcattatctgcaacagcct

SEQ ID NO: 1789 - DNA, 20 bp, Artificial sequence
  Synthetic oligonucleotide
caccccctccccaccgccgg

SEQ ID NO: 1790 - DNA, 20 bp, Artificial sequence
  Synthetic oligonucleotide
tgcctcacccccgctcctcc

SEQ ID NO: 1791 - DNA, 20 bp, Artificial sequence
  Synthetic oligonucleotide
agaggaagctagaaccagca

SEQ ID NO: 1792 - DNA, 20 bp, Artificial sequence
  Synthetic oligonucleotide
ctttattaaactagggtcca

SEQ ID NO: 1793 - DNA, 20 bp, Artificial sequence
  Synthetic oligonucleotide
accaggggctcgaaccagct

SEQ ID NO: 1794 - DNA, 20 bp, Artificial sequence
  Synthetic oligonucleotide
cgtctctgctgcccagccct

SEQ ID NO: 1795 - DNA, 20 bp, Artificial sequence
  Synthetic oligonucleotide
caggccccccaagacttagc

SEQ ID NO: 1796 - DNA, 20 bp, Artificial sequence
  Synthetic oligonucleotide
gctccggctctgtctccacc

SEQ ID NO: 1797 - DNA, 20 bp, Artificial sequence
  Synthetic oligonucleotide
ggccgctctgccactcggtc

SEQ ID NO: 1798 - DNA, 20 bp, Artificial sequence
  Synthetic oligonucleotide
tggcgtggggtcgcatggct

SEQ ID NO: 1799 - DNA, 20 bp, Artificial sequence
  Synthetic oligonucleotide
cctggctccccagttatgga

SEQ ID NO: 1800 - DNA, 20 bp, Artificial sequence
  Synthetic oligonucleotide
cggggacagggtctcccgct

SEQ ID NO: 1801 - DNA, 20 bp, Artificial sequence
  Synthetic oligonucleotide
ctatggcttacatcccagtc

SEQ ID NO: 1802 - DNA, 20 bp, Artificial sequence
  Synthetic oligonucleotide
gtctcgcattcctcattctc

SEQ ID NO: 1803 - DNA, 20 bp, Artificial sequence
  Synthetic oligonucleotide
gcagcggcctgaacatggtt

SEQ ID NO: 1804 - DNA, 20 bp, Artificial sequence
  Synthetic oligonucleotide
actggcgctgcatgtcttcc

SEQ ID NO: 1805 - DNA, 20 bp, Artificial sequence
  Synthetic oligonucleotide
tccatagaaaattccatctt

SEQ ID NO: 1806 - DNA, 20 bp, Artificial sequence
  Synthetic oligonucleotide
tcttctcttatctccccatc

SEQ ID NO: 1807 - DNA, 20 bp, Artificial sequence
  Synthetic oligonucleotide
tcagagccaggaagcagcac

SEQ ID NO: 1808 - DNA, 20 bp, Artificial sequence
  Synthetic oligonucleotide
tccatttatgagctaattca

SEQ ID NO: 1809 - DNA, 20 bp, Artificial sequence
  Synthetic oligonucleotide
ccagcagagacccaggcccc

SEQ ID NO: 1810 - DNA, 20 bp, Artificial sequence
  Synthetic oligonucleotide
cacagaaccttcatcttcct

SEQ ID NO: 1811 - DNA, 20 bp, Artificial sequence
  Synthetic oligonucleotide
aggcacggggtggcgtgggg

SEQ ID NO: 1812 - DNA, 20 bp, Artificial sequence
  Synthetic oligonucleotide
cagggtcccagctctttcta

SEQ ID NO: 1813 - DNA, 20 bp, Artificial sequence
  Synthetic oligonucleotide
cttctccaccagcccggccc

SEQ ID NO: 1814 - DNA, 20 bp, Artificial sequence
  Synthetic oligonucleotide
aattcagtcctcattttaaa

SEQ ID NO: 1815 - DNA, 20 bp, Artificial sequence
  Synthetic oligonucleotide
ctcccttcacattctaagct

SEQ ID NO: 1816 - DNA, 20 bp, Artificial sequence
  Synthetic oligonucleotide
ttttaaagttctccaatcga

SEQ ID NO: 1817 - DNA, 20 bp, Artificial sequence
  Synthetic oligonucleotide
aacaacttctaactcctatc

SEQ ID NO: 1818 - DNA, 20 bp, Artificial sequence
  Synthetic oligonucleotide
tccctcctggtcttctctta

SEQ ID NO: 1819 - DNA, 20 bp, Artificial sequence
  Synthetic oligonucleotide
gtgtctggtattcactatct

SEQ ID NO: 1820 - DNA, 20 bp, Artificial sequence
  Synthetic oligonucleotide
ttcctgcctgtgattggcca

SEQ ID NO: 1821 - DNA, 20 bp, Artificial sequence
  Synthetic oligonucleotide
cggaggcaggaggcacgggg

SEQ ID NO: 1822 - DNA, 20 bp, Artificial sequence
  Synthetic oligonucleotide
tgggcacaggggcggcgctg

SEQ ID NO: 1823 - DNA, 20 bp, Artificial sequence
  Synthetic oligonucleotide
tccaccgcttgctccacctt

SEQ ID NO: 1824 - DNA, 20 bp, Artificial sequence
  Synthetic oligonucleotide
gcaggcttcggcgttcagtg

SEQ ID NO: 1825 - DNA, 20 bp, Artificial sequence
  Synthetic oligonucleotide
gcaggctgcgcggaggcagg

SEQ ID NO: 1826 - DNA, 20 bp, Artificial sequence
  Synthetic oligonucleotide
ccccatccccaggtcggcct

SEQ ID NO: 1827 - DNA, 20 bp, Artificial sequence
  Synthetic oligonucleotide
acttggtgaatctttattaa

SEQ ID NO: 1828 - DNA, 20 bp, Artificial sequence
  Synthetic oligonucleotide
cccttcccaggtccagtccc

SEQ ID NO: 1829 - DNA, 20 bp, Artificial sequence
  Synthetic oligonucleotide
tcccagcacatttaccaagc

SEQ ID NO: 1830 - DNA, 20 bp, Artificial sequence
  Synthetic oligonucleotide
gcattatctgcaacagccta

SEQ ID NO: 1831 - DNA, 20 bp, Artificial sequence
  Synthetic oligonucleotide
cccatccccaggtcggcctc

SEQ ID NO: 1832 - DNA, 20 bp, Artificial sequence
  Synthetic oligonucleotide
tctcgcattcctcattctcc

SEQ ID NO: 1833 - DNA, 20 bp, Artificial sequence
  Synthetic oligonucleotide
gcctcacccccgctcctcct

SEQ ID NO: 1834 - DNA, 20 bp, Artificial sequence
  Synthetic oligonucleotide
aggaagctagaaccagcaga

SEQ ID NO: 1835 - DNA, 20 bp, Artificial sequence
  Synthetic oligonucleotide
tagggtccaccccaggagga

SEQ ID NO: 1836 - DNA, 20 bp, Artificial sequence
  Synthetic oligonucleotide
tgcctgcaatgcattagaaa

SEQ ID NO: 1837 - DNA, 20 bp, Artificial sequence
  Synthetic oligonucleotide
gcccacggcagcctgcacct

SEQ ID NO: 1838 - DNA, 20 bp, Artificial sequence
  Synthetic oligonucleotide
gccgctctgccactcggtct

SEQ ID NO: 1839 - DNA, 20 bp, Artificial sequence
  Synthetic oligonucleotide
atggcttacatcccagtcca

SEQ ID NO: 1840 - DNA, 20 bp, Artificial sequence
  Synthetic oligonucleotide
ccgcttgctccaccttggcc

SEQ ID NO: 1841 - DNA, 20 bp, Artificial sequence
  Synthetic oligonucleotide
cagtgaggactcctcccacc

SEQ ID NO: 1842 - DNA, 20 bp, Artificial sequence
  Synthetic oligonucleotide
gaggcccctgagctcatccc

SEQ ID NO: 1843 - DNA, 20 bp, Artificial sequence
  Synthetic oligonucleotide
ttccatcttcctctcccggg

SEQ ID NO: 1844 - DNA, 20 bp, Artificial sequence
  Synthetic oligonucleotide
caggcttcggcgttcagtga

SEQ ID NO: 1845 - DNA, 20 bp, Artificial sequence
  Synthetic oligonucleotide
gggtcccagctctttctaga

SEQ ID NO: 1846 - DNA, 20 bp, Artificial sequence
  Synthetic oligonucleotide
ccttctgaccccgtccaggc

SEQ ID NO: 1847 - DNA, 20 bp, Artificial sequence
  Synthetic oligonucleotide
tctcttatctccccatcccc

SEQ ID NO: 1848 - DNA, 20 bp, Artificial sequence
  Synthetic oligonucleotide
gccttccaagccttgttgca

SEQ ID NO: 1849 - DNA, 20 bp, Artificial sequence
  Synthetic oligonucleotide
acaacttctaactcctatct

SEQ ID NO: 1850 - DNA, 20 bp, Artificial sequence
  Synthetic oligonucleotide
ccctcctggtcttctcttat

SEQ ID NO: 1851 - DNA, 20 bp, Artificial sequence
  Synthetic oligonucleotide
caggctgcgcggaggcagga

SEQ ID NO: 1852 - DNA, 20 bp, Artificial sequence
  Synthetic oligonucleotide
tccggctctgtctccaccgc

SEQ ID NO: 1853 - DNA, 20 bp, Artificial sequence
  Synthetic oligonucleotide
accccctccccaccgccggt

SEQ ID NO: 1854 - DNA, 20 bp, Artificial sequence
  Synthetic oligonucleotide
gctgagcagctcctcctgca

SEQ ID NO: 1855 - DNA, 20 bp, Artificial sequence
  Synthetic oligonucleotide
ttcagtcctcattttaaagt

SEQ ID NO: 1856 - DNA, 20 bp, Artificial sequence
  Synthetic oligonucleotide
ggcacggggtggcgtggggt

SEQ ID NO: 1857 - DNA, 20 bp, Artificial sequence
  Synthetic oligonucleotide
tctccaccagcccggcccac

SEQ ID NO: 1858 - DNA, 20 bp, Artificial sequence
  Synthetic oligonucleotide
ttaaagttctccaatcgacg

SEQ ID NO: 1859 - DNA, 20 bp, Artificial sequence
  Synthetic oligonucleotide
tcccttcacattctaagctc

SEQ ID NO: 1860 - DNA, 20 bp, Artificial sequence
  Synthetic oligonucleotide
ttccctatttaactccctcc

SEQ ID NO: 1861 - DNA, 20 bp, Artificial sequence
  Synthetic oligonucleotide
cctcctctccccaagcccga

SEQ ID NO: 1862 - DNA, 20 bp, Artificial sequence
  Synthetic oligonucleotide
caggaagcagcacagaagcc

SEQ ID NO: 1863 - DNA, 20 bp, Artificial sequence
  Synthetic oligonucleotide
ctgcgcttctcaccggctcc

SEQ ID NO: 1864 - DNA, 20 bp, Artificial sequence
  Synthetic oligonucleotide
agcaagccccgcccccatac

SEQ ID NO: 1865 - DNA, 20 bp, Artificial sequence
  Synthetic oligonucleotide
ctaagctccaacctcacagt

SEQ ID NO: 1866 - DNA, 20 bp, Artificial sequence
  Synthetic oligonucleotide
cacctgctcagacagtgtct

SEQ ID NO: 1867 - DNA, 20 bp, Artificial sequence
  Synthetic oligonucleotide
agcaacgcagcccacagaac

SEQ ID NO: 1868 - DNA, 20 bp, Artificial sequence
  Synthetic oligonucleotide
cggctggggcggggacaggg

SEQ ID NO: 1869 - DNA, 20 bp, Artificial sequence
  Synthetic oligonucleotide
gcattagaaacctctaactc

SEQ ID NO: 1870 - DNA, 20 bp, Artificial sequence
  Synthetic oligonucleotide
cttggtgaatctttattaaa

SEQ ID NO: 1871 - DNA, 20 bp, Artificial sequence
  Synthetic oligonucleotide
ccccaagacttagcgacagg

SEQ ID NO: 1872 - DNA, 20 bp, Artificial sequence
  Synthetic oligonucleotide
ccccaacccattccctattt

SEQ ID NO: 1873 - DNA, 20 bp, Artificial sequence
  Synthetic oligonucleotide
caggggctcgaaccagctct

SEQ ID NO: 1874 - DNA, 20 bp, Artificial sequence
  Synthetic oligonucleotide
atttatgagctaattcagtc

SEQ ID NO: 1875 - DNA, 20 bp, Artificial sequence
  Synthetic oligonucleotide
cagtccagctgctctcccca

SEQ ID NO: 1876 - DNA, 20 bp, Artificial sequence
  Synthetic oligonucleotide
ggggacagggtctcccgctg

SEQ ID NO: 1877 - DNA, 20 bp, Artificial sequence
  Synthetic oligonucleotide
gaaagcattatgtatttata

SEQ ID NO: 1878 - DNA, 20 bp, Artificial sequence
  Synthetic oligonucleotide
tctctgctgcccagcccttc

SEQ ID NO: 1879 - DNA, 20 bp, Artificial sequence
  Synthetic oligonucleotide
tctcccgctgcaggctgcgc

SEQ ID NO: 1880 - DNA, 20 bp, Artificial sequence
  Synthetic oligonucleotide
ccttcccaggtccagtcccc

SEQ ID NO: 1881 - DNA, 20 bp, Artificial sequence
  Synthetic oligonucleotide
cgcccccatacctgccagga

SEQ ID NO: 1882 - DNA, 20 bp, Artificial sequence
  Synthetic oligonucleotide
tctaactcccagccaggtgc

SEQ ID NO: 1883 - DNA, 20 bp, Artificial sequence
  Synthetic oligonucleotide
cccaggaggacggctggggc

SEQ ID NO: 1884 - DNA, 20 bp, Artificial sequence
  Synthetic oligonucleotide
cctgctgcttgcctcacccc

SEQ ID NO: 1885 - DNA, 20 bp, Artificial sequence
  Synthetic oligonucleotide
ggcgtggggtcgcatggctg

SEQ ID NO: 1886 - DNA, 20 bp, Artificial sequence
  Synthetic oligonucleotide
tttattaaactagggtccac

SEQ ID NO: 1887 - DNA, 20 bp, Artificial sequence
  Synthetic oligonucleotide
ggagaaactgtcaatcaacc

SEQ ID NO: 1888 - DNA, 20 bp, Artificial sequence
  Synthetic oligonucleotide
tggcgctgcatgtcttccac

SEQ ID NO: 1889 - DNA, 20 bp, Artificial sequence
  Synthetic oligonucleotide
cccagcacatttaccaagcc

SEQ ID NO: 1890 - DNA, 20 bp, Artificial sequence
  Synthetic oligonucleotide
gcccggccccaacccggcct

SEQ ID NO: 1891 - DNA, 20 bp, Artificial sequence
  Synthetic oligonucleotide
cagcggcctgaacatggttc

SEQ ID NO: 1892 - DNA, 20 bp, Artificial sequence
  Synthetic oligonucleotide
aaatgcttctttggagccat

SEQ ID NO: 1893 - DNA, 20 bp, Artificial sequence
  Synthetic oligonucleotide
tagctctcctgagactacct

SEQ ID NO: 1894 - DNA, 20 bp, Artificial sequence
  Synthetic oligonucleotide
ggcacaggggcggcgctggt

SEQ ID NO: 1895 - DNA, 20 bp, Artificial sequence
  Synthetic oligonucleotide
ccatagaaaattccatcttc

SEQ ID NO: 1896 - DNA, 20 bp, Artificial sequence
  Synthetic oligonucleotide
cccggcctcaccccaggtta

SEQ ID NO: 1897 - DNA, 20 bp, Artificial sequence
  Synthetic oligonucleotide
atctcagtcccagtctcgca

SEQ ID NO: 1898 - DNA, 20 bp, Artificial sequence
  Synthetic oligonucleotide
ggctccccagttatggagat

SEQ ID NO: 1899 - DNA, 20 bp, Artificial sequence
  Synthetic oligonucleotide
tctggtattcactatctgcc

SEQ ID NO: 1900 - DNA, 20 bp, Artificial sequence
  Synthetic oligonucleotide
ggaggcaggaggcacggggt

SEQ ID NO: 1901 - DNA, 20 bp, Artificial sequence
  Synthetic oligonucleotide
cagcagagacccaggccccc

SEQ ID NO: 1902 - DNA, 20 bp, Artificial sequence
  Synthetic oligonucleotide
acagcctaatcccagcacat

SEQ ID NO: 1903 - DNA, 20 bp, Artificial sequence
  Synthetic oligonucleotide
acagaaccttcatcttcctg

SEQ ID NO: 1904 - DNA, 20 bp, Artificial sequence
  Synthetic oligonucleotide
tgatggagaataaagatcac

SEQ ID NO: 1905 - DNA, 16 bp, Artificial sequence
  Synthetic oligonucleotide
tgcattagaaacctct

SEQ ID NO: 1906 - DNA, 16 bp, Artificial sequence
  Synthetic oligonucleotide
taaactagggtccacc

SEQ ID NO: 1907 - DNA, 16 bp, Artificial sequence
  Synthetic oligonucleotide
acggctggggcgggga

SEQ ID NO: 1908 - DNA, 16 bp, Artificial sequence
  Synthetic oligonucleotide
agaggaagctagaacc

SEQ ID NO: 1909 - DNA, 16 bp, Artificial sequence
  Synthetic oligonucleotide
gtggggtcgcatggct

SEQ ID NO: 1910 - DNA, 16 bp, Artificial sequence
  Synthetic oligonucleotide
tcgaaccagctcttga

SEQ ID NO: 1911 - DNA, 16 bp, Artificial sequence
  Synthetic oligonucleotide
caaattccatcccccc

SEQ ID NO: 1912 - DNA, 16 bp, Artificial sequence
  Synthetic oligonucleotide
gcccgcacgcggccct

SEQ ID NO: 1913 - DNA, 16 bp, Artificial sequence
  Synthetic oligonucleotide
ccccgtgcccccgact

SEQ ID NO: 1914 - DNA, 16 bp, Artificial sequence
  Synthetic oligonucleotide
cagggtctcccgctgc

SEQ ID NO: 1915 - DNA, 16 bp, Artificial sequence
  Synthetic oligonucleotide
gcaggcttcggcgttc

SEQ ID NO: 1916 - DNA, 16 bp, Artificial sequence
  Synthetic oligonucleotide
cggaggcaggaggcac

SEQ ID NO: 1917 - DNA, 16 bp, Artificial sequence
  Synthetic oligonucleotide
atacctgccaggaatg

SEQ ID NO: 1918 - DNA, 16 bp, Artificial sequence
  Synthetic oligonucleotide
ggccccccaagactta

SEQ ID NO: 1919 - DNA, 16 bp, Artificial sequence
  Synthetic oligonucleotide
gcccgaccccgagtag

SEQ ID NO: 1920 - DNA, 16 bp, Artificial sequence
  Synthetic oligonucleotide
agactacctggaggcc

SEQ ID NO: 1921 - DNA, 16 bp, Artificial sequence
  Synthetic oligonucleotide
atctttattaaactag

SEQ ID NO: 1922 - DNA, 16 bp, Artificial sequence
  Synthetic oligonucleotide
tggccgagcatggcct

SEQ ID NO: 1923 - DNA, 16 bp, Artificial sequence
  Synthetic oligonucleotide
gtcggtttaatcactt

SEQ ID NO: 1924 - DNA, 16 bp, Artificial sequence
  Synthetic oligonucleotide
tctagaggcccctgag

SEQ ID NO: 1925 - DNA, 16 bp, Artificial sequence
  Synthetic oligonucleotide
gaccccgtccaggcat

SEQ ID NO: 1926 - DNA, 16 bp, Artificial sequence
  Synthetic oligonucleotide
tccaacctcacagtta

SEQ ID NO: 1927 - DNA, 16 bp, Artificial sequence
  Synthetic oligonucleotide
acgcagcttgcgcagg

SEQ ID NO: 1928 - DNA, 16 bp, Artificial sequence
  Synthetic oligonucleotide
tgcgtgaaacttggtg

SEQ ID NO: 1929 - DNA, 16 bp, Artificial sequence
  Synthetic oligonucleotide
ggttagccttccaagc

SEQ ID NO: 1930 - DNA, 16 bp, Artificial sequence
  Synthetic oligonucleotide
cattccctatttaact

SEQ ID NO: 1931 - DNA, 16 bp, Artificial sequence
  Synthetic oligonucleotide
gaggccgcgctcggcg

SEQ ID NO: 1932 - DNA, 16 bp, Artificial sequence
  Synthetic oligonucleotide
gcctgaacatggttca

SEQ ID NO: 1933 - DNA, 16 bp, Artificial sequence
  Synthetic oligonucleotide
ggggtggcgtggggtc

SEQ ID NO: 1934 - DNA, 16 bp, Artificial sequence
  Synthetic oligonucleotide
tttaccaagccgcccc

SEQ ID NO: 1935 - DNA, 16 bp, Artificial sequence
  Synthetic oligonucleotide
tcctatctcaaggatg

SEQ ID NO: 1936 - DNA, 16 bp, Artificial sequence
  Synthetic oligonucleotide
tcacagctgccccgtg

SEQ ID NO: 1937 - DNA, 16 bp, Artificial sequence
  Synthetic oligonucleotide
atataaaagagctagg

SEQ ID NO: 1938 - DNA, 16 bp, Artificial sequence
  Synthetic oligonucleotide
gcatggctgcaggctt

SEQ ID NO: 1939 - DNA, 16 bp, Artificial sequence
  Synthetic oligonucleotide
ccgagtagctctcctg

SEQ ID NO: 1940 - DNA, 16 bp, Artificial sequence
  Synthetic oligonucleotide
gcggaggagccgctta

SEQ ID NO: 1941 - DNA, 16 bp, Artificial sequence
  Synthetic oligonucleotide
gggcccgctcctgtag

SEQ ID NO: 1942 - DNA, 16 bp, Artificial sequence
  Synthetic oligonucleotide
aactgtcaatcaaccg

SEQ ID NO: 1943 - DNA, 16 bp, Artificial sequence
  Synthetic oligonucleotide
aacccggcctcacccc

SEQ ID NO: 1944 - DNA, 16 bp, Artificial sequence
  Synthetic oligonucleotide
ctgctatggcttacat

SEQ ID NO: 1945 - DNA, 16 bp, Artificial sequence
  Synthetic oligonucleotide
gctccccagttatgga

SEQ ID NO: 1946 - DNA, 16 bp, Artificial sequence
  Synthetic oligonucleotide
ggtccaccccaggagg

SEQ ID NO: 1947 - DNA, 16 bp, Artificial sequence
  Synthetic oligonucleotide
aactccctcctggtct

SEQ ID NO: 1948 - DNA, 16 bp, Artificial sequence
  Synthetic oligonucleotide
cgccggttccatctca

SEQ ID NO: 1949 - DNA, 16 bp, Artificial sequence
  Synthetic oligonucleotide
tctccccaagcccgac

SEQ ID NO: 1950 - DNA, 16 bp, Artificial sequence
  Synthetic oligonucleotide
acttggtgaatcttta

SEQ ID NO: 1951 - DNA, 16 bp, Artificial sequence
  Synthetic oligonucleotide
aaatcgctgttcagag

SEQ ID NO: 1952 - DNA, 16 bp, Artificial sequence
  Synthetic oligonucleotide
ggcggggacagggtct

SEQ ID NO: 1953 - DNA, 16 bp, Artificial sequence
  Synthetic oligonucleotide
atcccagcacatttac

SEQ ID NO: 1954 - DNA, 16 bp, Artificial sequence
  Synthetic oligonucleotide
ggaggcacggggtggc

SEQ ID NO: 1955 - DNA, 16 bp, Artificial sequence
  Synthetic oligonucleotide
cccgctgcaggctgcg

SEQ ID NO: 1956 - DNA, 16 bp, Artificial sequence
  Synthetic oligonucleotide
ttgcattatctgcaac

SEQ ID NO: 1957 - DNA, 16 bp, Artificial sequence
  Synthetic oligonucleotide
gcgcagctcgggctcc

SEQ ID NO: 1958 - DNA, 16 bp, Artificial sequence
  Synthetic oligonucleotide
aggtatagccgcccac

SEQ ID NO: 1959 - DNA, 16 bp, Artificial sequence
  Synthetic oligonucleotide
ttacatcccagtccag

SEQ ID NO: 1960 - DNA, 16 bp, Artificial sequence
  Synthetic oligonucleotide
ggagatcgaaacgggc

SEQ ID NO: 1961 - DNA, 16 bp, Artificial sequence
  Synthetic oligonucleotide
gccgggcctgcgccgc

SEQ ID NO: 1962 - DNA, 16 bp, Artificial sequence
  Synthetic oligonucleotide
tccgcgcgcgcagccg

SEQ ID NO: 1963 - DNA, 16 bp, Artificial sequence
  Synthetic oligonucleotide
gcaacgcagcccacag

SEQ ID NO: 1964 - DNA, 16 bp, Artificial sequence
  Synthetic oligonucleotide
gcggtactgcaccagg

SEQ ID NO: 1965 - DNA, 16 bp, Artificial sequence
  Synthetic oligonucleotide
cgcccaccaggagggt

SEQ ID NO: 1966 - DNA, 16 bp, Artificial sequence
  Synthetic oligonucleotide
agtgattgtcgctggg

SEQ ID NO: 1967 - DNA, 16 bp, Artificial sequence
  Synthetic oligonucleotide
caaaagcgacccagtg

SEQ ID NO: 1968 - DNA, 16 bp, Artificial sequence
  Synthetic oligonucleotide
cctggaaggcctcggc

SEQ ID NO: 1969 - DNA, 16 bp, Artificial sequence
  Synthetic oligonucleotide
ggcagaatgaaacctg

SEQ ID NO: 1970 - DNA, 16 bp, Artificial sequence
  Synthetic oligonucleotide
gccgcccccaacccat

SEQ ID NO: 1971 - DNA, 16 bp, Artificial sequence
  Synthetic oligonucleotide
gccccggcctggtaca

SEQ ID NO: 1972 - DNA, 16 bp, Artificial sequence
  Synthetic oligonucleotide
ccagttccgatttgta

SEQ ID NO: 1973 - DNA, 16 bp, Artificial sequence
  Synthetic oligonucleotide
ccatttatgagctaat

SEQ ID NO: 1974 - DNA, 16 bp, Artificial sequence
  Synthetic oligonucleotide
tcgacggctagctacc

SEQ ID NO: 1975 - DNA, 16 bp, Artificial sequence
  Synthetic oligonucleotide
ggtaatcccaaaagcg

SEQ ID NO: 1976 - DNA, 16 bp, Artificial sequence
  Synthetic oligonucleotide
gcccggccccaacccg

SEQ ID NO: 1977 - DNA, 16 bp, Artificial sequence
  Synthetic oligonucleotide
agccccgcccccatac

SEQ ID NO: 1978 - DNA, 16 bp, Artificial sequence
  Synthetic oligonucleotide
ccaggaggacggctgg

SEQ ID NO: 1979 - DNA, 16 bp, Artificial sequence
  Synthetic oligonucleotide
taaagttctccaatcg

SEQ ID NO: 1980 - DNA, 16 bp, Artificial sequence
  Synthetic oligonucleotide
cggcgttcagtgattg

SEQ ID NO: 1981 - DNA, 16 bp, Artificial sequence
  Synthetic oligonucleotide
aggctgcgcggaggca

SEQ ID NO: 1982 - DNA, 16 bp, Artificial sequence
  Synthetic oligonucleotide
gtgaatctttattaaa

SEQ ID NO: 1983 - DNA, 16 bp, Artificial sequence
  Synthetic oligonucleotide
aaagttctccaatcga

SEQ ID NO: 1984 - DNA, 16 bp, Artificial sequence
  Synthetic oligonucleotide
tccctatttaactccc

SEQ ID NO: 1985 - DNA, 16 bp, Artificial sequence
  Synthetic oligonucleotide
gcagaatgaaacctgg

SEQ ID NO: 1986 - DNA, 16 bp, Artificial sequence
  Synthetic oligonucleotide
gcattagaaacctcta

SEQ ID NO: 1987 - DNA, 16 bp, Artificial sequence
  Synthetic oligonucleotide
aacaacttctaactcc

SEQ ID NO: 1988 - DNA, 16 bp, Artificial sequence
  Synthetic oligonucleotide
ctgccccgtgtctggt

SEQ ID NO: 1989 - DNA, 16 bp, Artificial sequence
  Synthetic oligonucleotide
gcccaccaggagggtc

SEQ ID NO: 1990 - DNA, 16 bp, Artificial sequence
  Synthetic oligonucleotide
ggaggcaggaggcacg

SEQ ID NO: 1991 - DNA, 16 bp, Artificial sequence
  Synthetic oligonucleotide
catggctgcaggcttc

SEQ ID NO: 1992 - DNA, 16 bp, Artificial sequence
  Synthetic oligonucleotide
aaaagcgacccagtgc

SEQ ID NO: 1993 - DNA, 16 bp, Artificial sequence
  Synthetic oligonucleotide
gccggttccatctcag

SEQ ID NO: 1994 - DNA, 16 bp, Artificial sequence
  Synthetic oligonucleotide
ggtatagccgcccacc

SEQ ID NO: 1995 - DNA, 16 bp, Artificial sequence
  Synthetic oligonucleotide
tcccagcacatttacc

SEQ ID NO: 1996 - DNA, 16 bp, Artificial sequence
  Synthetic oligonucleotide
gcggggacagggtctc

SEQ ID NO: 1997 - DNA, 16 bp, Artificial sequence
  Synthetic oligonucleotide
ggcgttcagtgattgt

SEQ ID NO: 1998 - DNA, 16 bp, Artificial sequence
  Synthetic oligonucleotide
aatcgctgttcagagc

SEQ ID NO: 1999 - DNA, 16 bp, Artificial sequence
  Synthetic oligonucleotide
cgaggcgcacccgcag

SEQ ID NO: 2000 - DNA, 16 bp, Artificial sequence
  Synthetic oligonucleotide
gaggagccgcttacgc

SEQ ID NO: 2001 - DNA, 16 bp, Artificial sequence
  Synthetic oligonucleotide
agcggctggccggcca

SEQ ID NO: 2002 - DNA, 16 bp, Artificial sequence
  Synthetic oligonucleotide
ggaagctagaaccagc

SEQ ID NO: 2003 - DNA, 16 bp, Artificial sequence
  Synthetic oligonucleotide
cgcgcccagcggaaaa

SEQ ID NO: 2004 - DNA, 16 bp, Artificial sequence
  Synthetic oligonucleotide
gtccaccccaggagga

SEQ ID NO: 2005 - DNA, 16 bp, Artificial sequence
  Synthetic oligonucleotide
acccggcctcacccca

SEQ ID NO: 2006 - DNA, 16 bp, Artificial sequence
  Synthetic oligonucleotide
caccccaccttctagc

SEQ ID NO: 2007 - DNA, 16 bp, Artificial sequence
  Synthetic oligonucleotide
cgagtagctctcctga

SEQ ID NO: 2008 - DNA, 16 bp, Artificial sequence
  Synthetic oligonucleotide
gactacctggaggcca

SEQ ID NO: 2009 - DNA, 16 bp, Artificial sequence
  Synthetic oligonucleotide
ccgcccccaacccatt

SEQ ID NO: 2010 - DNA, 16 bp, Artificial sequence
  Synthetic oligonucleotide
ttgtaggccttcaact

SEQ ID NO: 2011 - DNA, 16 bp, Artificial sequence
  Synthetic oligonucleotide
tggaaggcctcggcct

SEQ ID NO: 2012 - DNA, 16 bp, Artificial sequence
  Synthetic oligonucleotide
tctttattaaactagg

SEQ ID NO: 2013 - DNA, 16 bp, Artificial sequence
  Synthetic oligonucleotide
ccccggcctggtacac

SEQ ID NO: 2014 - DNA, 16 bp, Artificial sequence
  Synthetic oligonucleotide
ttaccaagccgccccc

SEQ ID NO: 2015 - DNA, 16 bp, Artificial sequence
  Synthetic oligonucleotide
cggcagcctgcacctt

SEQ ID NO: 2016 - DNA, 16 bp, Artificial sequence
  Synthetic oligonucleotide
tacctgccaggaatgt

SEQ ID NO: 2017 - DNA, 16 bp, Artificial sequence
  Synthetic oligonucleotide
gtgcccccgactgcgc

SEQ ID NO: 2018 - DNA, 16 bp, Artificial sequence
  Synthetic oligonucleotide
cccggccccaacccgg

SEQ ID NO: 2019 - DNA, 16 bp, Artificial sequence
  Synthetic oligonucleotide
cgacggctagctaccg

SEQ ID NO: 2020 - DNA, 16 bp, Artificial sequence
  Synthetic oligonucleotide
ccctcgcgggccccgg

SEQ ID NO: 2021 - DNA, 16 bp, Artificial sequence
  Synthetic oligonucleotide
ccgcccccatacctgc

SEQ ID NO: 2022 - DNA, 16 bp, Artificial sequence
  Synthetic oligonucleotide
ctccccagttatggag

SEQ ID NO: 2023 - DNA, 16 bp, Artificial sequence
  Synthetic oligonucleotide
cctatctcaaggatgg

SEQ ID NO: 2024 - DNA, 16 bp, Artificial sequence
  Synthetic oligonucleotide
tggggtcgcatggctg

SEQ ID NO: 2025 - DNA, 16 bp, Artificial sequence
  Synthetic oligonucleotide
ggctgcgcggaggcag

SEQ ID NO: 2026 - DNA, 16 bp, Artificial sequence
  Synthetic oligonucleotide
agggtctcccgctgca

SEQ ID NO: 2027 - DNA, 16 bp, Artificial sequence
  Synthetic oligonucleotide
tgctatggcttacatc

SEQ ID NO: 2028 - DNA, 16 bp, Artificial sequence
  Synthetic oligonucleotide
tgtcaatcaaccgcca

SEQ ID NO: 2029 - DNA, 16 bp, Artificial sequence
  Synthetic oligonucleotide
tagccttccaagcctt

SEQ ID NO: 2030 - DNA, 16 bp, Artificial sequence
  Synthetic oligonucleotide
attatctgcaacagcc

SEQ ID NO: 2031 - DNA, 16 bp, Artificial sequence
  Synthetic oligonucleotide
gtaatcccaaaagcga

SEQ ID NO: 2032 - DNA, 16 bp, Artificial sequence
  Synthetic oligonucleotide
ccgcgcgcgcagccgc

SEQ ID NO: 2033 - DNA, 16 bp, Artificial sequence
  Synthetic oligonucleotide
caacgcagcccacaga

SEQ ID NO: 2034 - DNA, 16 bp, Artificial sequence
  Synthetic oligonucleotide
tataaaagagctaggg

SEQ ID NO: 2035 - DNA, 16 bp, Artificial sequence
  Synthetic oligonucleotide
cgaaccagctcttgag

SEQ ID NO: 2036 - DNA, 16 bp, Artificial sequence
  Synthetic oligonucleotide
cccgaccccgagtagc

SEQ ID NO: 2037 - DNA, 16 bp, Artificial sequence
  Synthetic oligonucleotide
tgcgccgcctgcagct

SEQ ID NO: 2038 - DNA, 16 bp, Artificial sequence
  Synthetic oligonucleotide
cccgcacgcggccctg

SEQ ID NO: 2039 - DNA, 16 bp, Artificial sequence
  Synthetic oligonucleotide
caggcttcggcgttca

SEQ ID NO: 2040 - DNA, 16 bp, Artificial sequence
  Synthetic oligonucleotide
ctccccaccgccggtt

SEQ ID NO: 2041 - DNA, 16 bp, Artificial sequence
  Synthetic oligonucleotide
cggctggggcggggac

SEQ ID NO: 2042 - DNA, 16 bp, Artificial sequence
  Synthetic oligonucleotide
ggccgagcatggcctg

SEQ ID NO: 2043 - DNA, 16 bp, Artificial sequence
  Synthetic oligonucleotide
ccccatccccaggtcg

SEQ ID NO: 2044 - DNA, 16 bp, Artificial sequence
  Synthetic oligonucleotide
ctccaccgcttgctcc

SEQ ID NO: 2045 - DNA, 16 bp, Artificial sequence
  Synthetic oligonucleotide
caggaggacggctggg

SEQ ID NO: 2046 - DNA, 16 bp, Artificial sequence
  Synthetic oligonucleotide
gcgtgaaacttggtga

SEQ ID NO: 2047 - DNA, 16 bp, Artificial sequence
  Synthetic oligonucleotide
ctccccaagcccgacc

SEQ ID NO: 2048 - DNA, 16 bp, Artificial sequence
  Synthetic oligonucleotide
gggtggcgtggggtcg

SEQ ID NO: 2049 - DNA, 16 bp, Artificial sequence
  Synthetic oligonucleotide
ccgctgcaggctgcgc

SEQ ID NO: 2050 - DNA, 16 bp, Artificial sequence
  Synthetic oligonucleotide
ccaacctcacagttaa

SEQ ID NO: 2051 - DNA, 16 bp, Artificial sequence
  Synthetic oligonucleotide
cttggtgaatctttat

SEQ ID NO: 2052 - DNA, 16 bp, Artificial sequence
  Synthetic oligonucleotide
ctagaggcccctgagc

SEQ ID NO: 2053 - DNA, 16 bp, Artificial sequence
  Synthetic oligonucleotide
gccccccaagacttag

SEQ ID NO: 2054 - DNA, 16 bp, Artificial sequence
  Synthetic oligonucleotide
cggtactgcaccaggc

SEQ ID NO: 2055 - DNA, 16 bp, Artificial sequence
  Synthetic oligonucleotide
gaggcacggggtggcg

SEQ ID NO: 2056 - DNA, 16 bp, Artificial sequence
  Synthetic oligonucleotide
tcggtttaatcacttg

SEQ ID NO: 2057 - DNA, 16 bp, Artificial sequence
  Synthetic oligonucleotide
accccgtccaggcatc

SEQ ID NO: 2058 - DNA, 16 bp, Artificial sequence
  Synthetic oligonucleotide
ttatgagctaattcag

SEQ ID NO: 2059 - DNA, 16 bp, Artificial sequence
  Synthetic oligonucleotide
aaactagggtccaccc

SEQ ID NO: 2060 - DNA, 16 bp, Artificial sequence
  Synthetic oligonucleotide
ctggtattcactatct

SEQ ID NO: 2061 - DNA, 16 bp, Artificial sequence
  Synthetic oligonucleotide
cggtttaatcacttgg

SEQ ID NO: 2062 - DNA, 16 bp, Artificial sequence
  Synthetic oligonucleotide
gagccgcttacgcagc

SEQ ID NO: 2063 - DNA, 16 bp, Artificial sequence
  Synthetic oligonucleotide
ccggccccaacccggc

SEQ ID NO: 2064 - DNA, 16 bp, Artificial sequence
  Synthetic oligonucleotide
ccccgtccaggcatct

SEQ ID NO: 2065 - DNA, 16 bp, Artificial sequence
  Synthetic oligonucleotide
aactagggtccacccc

SEQ ID NO: 2066 - DNA, 16 bp, Artificial sequence
  Synthetic oligonucleotide
atggctgcaggcttcg

SEQ ID NO: 2067 - DNA, 16 bp, Artificial sequence
  Synthetic oligonucleotide
cggggacagggtctcc

SEQ ID NO: 2068 - DNA, 16 bp, Artificial sequence
  Synthetic oligonucleotide
ccccaccgccggttcc

SEQ ID NO: 2069 - DNA, 16 bp, Artificial sequence
  Synthetic oligonucleotide
ccgaccccgagtagct

SEQ ID NO: 2070 - DNA, 16 bp, Artificial sequence
  Synthetic oligonucleotide
ctccaatcgacggcta

SEQ ID NO: 2071 - DNA, 16 bp, Artificial sequence
  Synthetic oligonucleotide
ccgcacgcggccctgt

SEQ ID NO: 2072 - DNA, 16 bp, Artificial sequence
  Synthetic oligonucleotide
gcccctgagctcatcc

SEQ ID NO: 2073 - DNA, 16 bp, Artificial sequence
  Synthetic oligonucleotide
agccttccaagccttg

SEQ ID NO: 2074 - DNA, 16 bp, Artificial sequence
  Synthetic oligonucleotide
ctttattaaactaggg

SEQ ID NO: 2075 - DNA, 16 bp, Artificial sequence
  Synthetic oligonucleotide
ggctggggcggggaca

SEQ ID NO: 2076 - DNA, 16 bp, Artificial sequence
  Synthetic oligonucleotide
acttctaactcctatc

SEQ ID NO: 2077 - DNA, 16 bp, Artificial sequence
  Synthetic oligonucleotide
gtatagccgcccacca

SEQ ID NO: 2078 - DNA, 16 bp, Artificial sequence
  Synthetic oligonucleotide
gaaggcctcggcctgc

SEQ ID NO: 2079 - DNA, 16 bp, Artificial sequence
  Synthetic oligonucleotide
gcgcgcgcagccgctc

SEQ ID NO: 2080 - DNA, 16 bp, Artificial sequence
  Synthetic oligonucleotide
ccccaccttctagcgg

SEQ ID NO: 2081 - DNA, 16 bp, Artificial sequence
  Synthetic oligonucleotide
agaatgaaacctggac

SEQ ID NO: 2082 - DNA, 16 bp, Artificial sequence
  Synthetic oligonucleotide
attagaaacctctaac

SEQ ID NO: 2083 - DNA, 16 bp, Artificial sequence
  Synthetic oligonucleotide
tccaccccaggaggac

SEQ ID NO: 2084 - DNA, 16 bp, Artificial sequence
  Synthetic oligonucleotide
ccaccgcttgctccac

SEQ ID NO: 2085 - DNA, 16 bp, Artificial sequence
  Synthetic oligonucleotide
gagccaggacgagtgt

SEQ ID NO: 2086 - DNA, 16 bp, Artificial sequence
  Synthetic oligonucleotide
atggagatctgaggac

SEQ ID NO: 2087 - DNA, 16 bp, Artificial sequence
  Synthetic oligonucleotide
ccaccaggagggtcaa

SEQ ID NO: 2088 - DNA, 16 bp, Artificial sequence
  Synthetic oligonucleotide
cgtgaaacttggtgaa

SEQ ID NO: 2089 - DNA, 16 bp, Artificial sequence
  Synthetic oligonucleotide
ccctatttaactccct

SEQ ID NO: 2090 - DNA, 16 bp, Artificial sequence
  Synthetic oligonucleotide
aaagcgacccagtgcc

SEQ ID NO: 2091 - DNA, 16 bp, Artificial sequence
  Synthetic oligonucleotide
ctatctcaaggatggg

SEQ ID NO: 2092 - DNA, 16 bp, Artificial sequence
  Synthetic oligonucleotide
cgctgcaggctgcgcg

SEQ ID NO: 2093 - DNA, 16 bp, Artificial sequence
  Synthetic oligonucleotide
taatcccaaaagcgac

SEQ ID NO: 2094 - DNA, 16 bp, Artificial sequence
  Synthetic oligonucleotide
aggcacggggtggcgt

SEQ ID NO: 2095 - DNA, 16 bp, Artificial sequence
  Synthetic oligonucleotide
gcgttcagtgattgtc

SEQ ID NO: 2096 - DNA, 16 bp, Artificial sequence
  Synthetic oligonucleotide
ccggcctggtacactg

SEQ ID NO: 2097 - DNA, 16 bp, Artificial sequence
  Synthetic oligonucleotide
caacctcacagttaag

SEQ ID NO: 2098 - DNA, 16 bp, Artificial sequence
  Synthetic oligonucleotide
aggcttcggcgttcag

SEQ ID NO: 2099 - DNA, 16 bp, Artificial sequence
  Synthetic oligonucleotide
gcgcccagcggaaaag

SEQ ID NO: 2100 - DNA, 16 bp, Artificial sequence
  Synthetic oligonucleotide
gaggcaggaggcacgg

SEQ ID NO: 2101 - DNA, 16 bp, Artificial sequence
  Synthetic oligonucleotide
gtcaatcaaccgccag

SEQ ID NO: 2102 - DNA, 16 bp, Artificial sequence
  Synthetic oligonucleotide
gctatggcttacatcc

SEQ ID NO: 2103 - DNA, 16 bp, Artificial sequence
  Synthetic oligonucleotide
gggaaccgagcaagcc

SEQ ID NO: 2104 - DNA, 16 bp, Artificial sequence
  Synthetic oligonucleotide
taggccttcaactcct

SEQ ID NO: 2105 - DNA, 16 bp, Artificial sequence
  Synthetic oligonucleotide
cagcccggcccactgg

SEQ ID NO: 2106 - DNA, 16 bp, Artificial sequence
  Synthetic oligonucleotide
ttatctgcaacagcct

SEQ ID NO: 2107 - DNA, 16 bp, Artificial sequence
  Synthetic oligonucleotide
gccgagcatggcctgc

SEQ ID NO: 2108 - DNA, 16 bp, Artificial sequence
  Synthetic oligonucleotide
cctcgcgggccccggc

SEQ ID NO: 2109 - DNA, 16 bp, Artificial sequence
  Synthetic oligonucleotide
gacggctagctaccgt

SEQ ID NO: 2110 - DNA, 16 bp, Artificial sequence
  Synthetic oligonucleotide
gggtctcccgctgcag

SEQ ID NO: 2111 - DNA, 16 bp, Artificial sequence
  Synthetic oligonucleotide
tactgcaccaggcggc

SEQ ID NO: 2112 - DNA, 16 bp, Artificial sequence
  Synthetic oligonucleotide
ggtggcgtggggtcgc

SEQ ID NO: 2113 - DNA, 16 bp, Artificial sequence
  Synthetic oligonucleotide
gaatgtgaccagcaac

SEQ ID NO: 2114 - DNA, 16 bp, Artificial sequence
  Synthetic oligonucleotide
gaggcgcacccgcagc

SEQ ID NO: 2115 - DNA, 16 bp, Artificial sequence
  Synthetic oligonucleotide
gcgccgcctgcagctc

SEQ ID NO: 2116 - DNA, 16 bp, Artificial sequence
  Synthetic oligonucleotide
taccaagccgccccca

SEQ ID NO: 2117 - DNA, 16 bp, Artificial sequence
  Synthetic oligonucleotide
actacctggaggccag

SEQ ID NO: 2118 - DNA, 16 bp, Artificial sequence
  Synthetic oligonucleotide
ttggtgaatctttatt

SEQ ID NO: 2119 - DNA, 16 bp, Artificial sequence
  Synthetic oligonucleotide
aagctagaaccagcag

SEQ ID NO: 2120 - DNA, 16 bp, Artificial sequence
  Synthetic oligonucleotide
ccggccagggagccca

SEQ ID NO: 2121 - DNA, 16 bp, Artificial sequence
  Synthetic oligonucleotide
cctcaccccaggttag

SEQ ID NO: 2122 - DNA, 16 bp, Artificial sequence
  Synthetic oligonucleotide
gaaccagctcttgagg

SEQ ID NO: 2123 - DNA, 16 bp, Artificial sequence
  Synthetic oligonucleotide
tatgagctaattcagt

SEQ ID NO: 2124 - DNA, 16 bp, Artificial sequence
  Synthetic oligonucleotide
ccggttccatctcagt

SEQ ID NO: 2125 - DNA, 16 bp, Artificial sequence
  Synthetic oligonucleotide
gctgcgcggaggcagg

SEQ ID NO: 2126 - DNA, 16 bp, Artificial sequence
  Synthetic oligonucleotide
tgcccccgactgcgct

SEQ ID NO: 2127 - DNA, 16 bp, Artificial sequence
  Synthetic oligonucleotide
ggggtcgcatggctgc

SEQ ID NO: 2128 - DNA, 16 bp, Artificial sequence
  Synthetic oligonucleotide
agcacatttaccaagc

SEQ ID NO: 2129 - DNA, 16 bp, Artificial sequence
  Synthetic oligonucleotide
gagtagctctcctgag

SEQ ID NO: 2130 - DNA, 16 bp, Artificial sequence
  Synthetic oligonucleotide
aggaggacggctgggg

SEQ ID NO: 2131 - DNA, 16 bp, Artificial sequence
  Synthetic oligonucleotide
ccccccaagacttagc

SEQ ID NO: 2132 - DNA, 16 bp, Artificial sequence
  Synthetic oligonucleotide
cgcccccatacctgcc

SEQ ID NO: 2133 - DNA, 16 bp, Artificial sequence
  Synthetic oligonucleotide
cgcccccaacccattc

SEQ ID NO: 2134 - DNA, 16 bp, Artificial sequence
  Synthetic oligonucleotide
tccccaagcccgaccc

SEQ ID NO: 2135 - DNA, 16 bp, Artificial sequence
  Synthetic oligonucleotide
aacgcagcccacagaa

SEQ ID NO: 2136 - DNA, 16 bp, Artificial sequence
  Synthetic oligonucleotide
ccatccccaggtcggc

SEQ ID NO: 2137 - DNA, 16 bp, Artificial sequence
  Synthetic oligonucleotide
gcccccgactgcgctt

SEQ ID NO: 2138 - DNA, 16 bp, Artificial sequence
  Synthetic oligonucleotide
cctgagctcatccccg

SEQ ID NO: 2139 - DNA, 16 bp, Artificial sequence
  Synthetic oligonucleotide
tgaccagcaacgcagc

SEQ ID NO: 2140 - DNA, 16 bp, Artificial sequence
  Synthetic oligonucleotide
ggggacagggtctccc

SEQ ID NO: 2141 - DNA, 16 bp, Artificial sequence
  Synthetic oligonucleotide
ctgcaacagcctaatc

SEQ ID NO: 2142 - DNA, 16 bp, Artificial sequence
  Synthetic oligonucleotide
ctgcaccaggcggccg

SEQ ID NO: 2143 - DNA, 16 bp, Artificial sequence
  Synthetic oligonucleotide
cccaagcccgaccccg

SEQ ID NO: 2144 - DNA, 16 bp, Artificial sequence
  Synthetic oligonucleotide
ctgcacctcgccgcgg

SEQ ID NO: 2145 - DNA, 16 bp, Artificial sequence
  Synthetic oligonucleotide
tagaaacctctaactc

SEQ ID NO: 2146 - DNA, 16 bp, Artificial sequence
  Synthetic oligonucleotide
tccaatcgacggctag

SEQ ID NO: 2147 - DNA, 16 bp, Artificial sequence
  Synthetic oligonucleotide
agccgcttacgcagct

SEQ ID NO: 2148 - DNA, 16 bp, Artificial sequence
  Synthetic oligonucleotide
ggtttaatcacttgga

SEQ ID NO: 2149 - DNA, 16 bp, Artificial sequence
  Synthetic oligonucleotide
cacctgctcagacagt

SEQ ID NO: 2150 - DNA, 16 bp, Artificial sequence
  Synthetic oligonucleotide
gctagaaccagcagag

SEQ ID NO: 2151 - DNA, 16 bp, Artificial sequence
  Synthetic oligonucleotide
agcccggcccactggc

SEQ ID NO: 2152 - DNA, 16 bp, Artificial sequence
  Synthetic oligonucleotide
acgcagcccacagaac

SEQ ID NO: 2153 - DNA, 16 bp, Artificial sequence
  Synthetic oligonucleotide
cgttcagtgattgtcg

SEQ ID NO: 2154 - DNA, 16 bp, Artificial sequence
  Synthetic oligonucleotide
tggctgcaggcttcgg

SEQ ID NO: 2155 - DNA, 16 bp, Artificial sequence
  Synthetic oligonucleotide
tatagccgcccaccag

SEQ ID NO: 2156 - DNA, 16 bp, Artificial sequence
  Synthetic oligonucleotide
gaatgaaacctggacc

SEQ ID NO: 2157 - DNA, 16 bp, Artificial sequence
  Synthetic oligonucleotide
tcccagtctcgcattc

SEQ ID NO: 2158 - DNA, 16 bp, Artificial sequence
  Synthetic oligonucleotide
tggtgaatctttatta

SEQ ID NO: 2159 - DNA, 16 bp, Artificial sequence
  Synthetic oligonucleotide
cccccaagacttagcg

SEQ ID NO: 2160 - DNA, 16 bp, Artificial sequence
  Synthetic oligonucleotide
ggcacggggtggcgtg

SEQ ID NO: 2161 - DNA, 16 bp, Artificial sequence
  Synthetic oligonucleotide
aaggcctcggcctgca

SEQ ID NO: 2162 - DNA, 16 bp, Artificial sequence
  Synthetic oligonucleotide
gcacatttaccaagcc

SEQ ID NO: 2163 - DNA, 16 bp, Artificial sequence
  Synthetic oligonucleotide
cctatttaactccctc

SEQ ID NO: 2164 - DNA, 16 bp, Artificial sequence
  Synthetic oligonucleotide
aatcccaaaagcgacc

SEQ ID NO: 2165 - DNA, 16 bp, Artificial sequence
  Synthetic oligonucleotide
ccaacccattccctat

SEQ ID NO: 2166 - DNA, 16 bp, Artificial sequence
  Synthetic oligonucleotide
ctggtacactgccagg

SEQ ID NO: 2167 - DNA, 16 bp, Artificial sequence
  Synthetic oligonucleotide
ctgcgcggaggcagga

SEQ ID NO: 2168 - DNA, 16 bp, Artificial sequence
  Synthetic oligonucleotide
cttccaagccttgttg

SEQ ID NO: 2169 - DNA, 16 bp, Artificial sequence
  Synthetic oligonucleotide
gtgaaacttggtgaat

SEQ ID NO: 2170 - DNA, 16 bp, Artificial sequence
  Synthetic oligonucleotide
aagcgacccagtgcca

SEQ ID NO: 2171 - DNA, 16 bp, Artificial sequence
  Synthetic oligonucleotide
gctggggcggggacag

SEQ ID NO: 2172 - DNA, 16 bp, Artificial sequence
  Synthetic oligonucleotide
caatcaaccgccagtg

SEQ ID NO: 2173 - DNA, 16 bp, Artificial sequence
  Synthetic oligonucleotide
cggccccaacccggcc

SEQ ID NO: 2174 - DNA, 16 bp, Artificial sequence
  Synthetic oligonucleotide
ggaaccgagcaagccc

SEQ ID NO: 2175 - DNA, 16 bp, Artificial sequence
  Synthetic oligonucleotide
ggaggacggctggggc

SEQ ID NO: 2176 - DNA, 16 bp, Artificial sequence
  Synthetic oligonucleotide
aggcaggaggcacggg

SEQ ID NO: 2177 - DNA, 16 bp, Artificial sequence
  Synthetic oligonucleotide
cgaggcccagagagcg

SEQ ID NO: 2178 - DNA, 16 bp, Artificial sequence
  Synthetic oligonucleotide
aactccttcatggtct

SEQ ID NO: 2179 - DNA, 16 bp, Artificial sequence
  Synthetic oligonucleotide
cccaccgccggttcca

SEQ ID NO: 2180 - DNA, 16 bp, Artificial sequence
  Synthetic oligonucleotide
cgcgcgcagccgctcg

SEQ ID NO: 2181 - DNA, 16 bp, Artificial sequence
  Synthetic oligonucleotide
ccaccccaggaggacg

SEQ ID NO: 2182 - DNA, 16 bp, Artificial sequence
  Synthetic oligonucleotide
aacctcacagttaagc

SEQ ID NO: 2183 - DNA, 16 bp, Artificial sequence
  Synthetic oligonucleotide
ctcaccccaggttagc

SEQ ID NO: 2184 - DNA, 16 bp, Artificial sequence
  Synthetic oligonucleotide
aaccagctcttgaggc

SEQ ID NO: 2185 - DNA, 16 bp, Artificial sequence
  Synthetic oligonucleotide
ctctttctagaggccc

SEQ ID NO: 2186 - DNA, 16 bp, Artificial sequence
  Synthetic oligonucleotide
tctaactcctatctca

SEQ ID NO: 2187 - DNA, 16 bp, Artificial sequence
  Synthetic oligonucleotide
gctccttggacagccg

SEQ ID NO: 2188 - DNA, 16 bp, Artificial sequence
  Synthetic oligonucleotide
gcccccatacctgcca

SEQ ID NO: 2189 - DNA, 16 bp, Artificial sequence
  Synthetic oligonucleotide
accaagccgcccccaa

SEQ ID NO: 2190 - DNA, 16 bp, Artificial sequence
  Synthetic oligonucleotide
gtggcgtggggtcgca

SEQ ID NO: 2191 - DNA, 16 bp, Artificial sequence
  Synthetic oligonucleotide
cggccagggagcccac

SEQ ID NO: 2192 - DNA, 16 bp, Artificial sequence
  Synthetic oligonucleotide
aggcgcacccgcagct

SEQ ID NO: 2193 - DNA, 16 bp, Artificial sequence
  Synthetic oligonucleotide
ccttcccaggtccagt

SEQ ID NO: 2194 - DNA, 16 bp, Artificial sequence
  Synthetic oligonucleotide
atgagctaattcagtc

SEQ ID NO: 2195 - DNA, 16 bp, Artificial sequence
  Synthetic oligonucleotide
gctgcaggctgcgcgg

SEQ ID NO: 2196 - DNA, 16 bp, Artificial sequence
  Synthetic oligonucleotide
ctcgcgggccccggcc

SEQ ID NO: 2197 - DNA, 16 bp, Artificial sequence
  Synthetic oligonucleotide
tatggcttacatccca

SEQ ID NO: 2198 - DNA, 16 bp, Artificial sequence
  Synthetic oligonucleotide
acggctagctaccgtg

SEQ ID NO: 2199 - DNA, 16 bp, Artificial sequence
  Synthetic oligonucleotide
gatctgaggacactgg

SEQ ID NO: 2200 - DNA, 16 bp, Artificial sequence
  Synthetic oligonucleotide
actagggtccacccca

SEQ ID NO: 2201 - DNA, 16 bp, Artificial sequence
  Synthetic oligonucleotide
tggtattcactatctg

SEQ ID NO: 2202 - DNA, 16 bp, Artificial sequence
  Synthetic oligonucleotide
atccccaggtcggcct

SEQ ID NO: 2203 - DNA, 16 bp, Artificial sequence
  Synthetic oligonucleotide
tgtggaacaagttcaa

SEQ ID NO: 2204 - DNA, 16 bp, Artificial sequence
  Synthetic oligonucleotide
cgcacgcggccctgtt

SEQ ID NO: 2205 - DNA, 16 bp, Artificial sequence
  Synthetic oligonucleotide
ccagcggaaaagcatg

SEQ ID NO: 2206 - DNA, 16 bp, Artificial sequence
  Synthetic oligonucleotide
ggcttcggcgttcagt

SEQ ID NO: 2207 - DNA, 16 bp, Artificial sequence
  Synthetic oligonucleotide
ctctcctgagactacc

SEQ ID NO: 2208 - DNA, 16 bp, Artificial sequence
  Synthetic oligonucleotide
tttattaaactagggt

SEQ ID NO: 2209 - DNA, 16 bp, Artificial sequence
  Synthetic oligonucleotide
gggtcgcatggctgca

SEQ ID NO: 2210 - DNA, 16 bp, Artificial sequence
  Synthetic oligonucleotide
cgaccccgagtagctc

SEQ ID NO: 2211 - DNA, 16 bp, Artificial sequence
  Synthetic oligonucleotide
ggtctcccgctgcagg

SEQ ID NO: 2212 - DNA, 16 bp, Artificial sequence
  Synthetic oligonucleotide
gaattccagagagcta

SEQ ID NO: 2213 - DNA, 16 bp, Artificial sequence
  Synthetic oligonucleotide
gtccaggcatctagta

SEQ ID NO: 2214 - DNA, 16 bp, Artificial sequence
  Synthetic oligonucleotide
atggcttacatcccag

SEQ ID NO: 2215 - DNA, 16 bp, Artificial sequence
  Synthetic oligonucleotide
agaaacctctaactcc

SEQ ID NO: 2216 - DNA, 16 bp, Artificial sequence
  Synthetic oligonucleotide
gaaccgagcaagcccc

SEQ ID NO: 2217 - DNA, 16 bp, Artificial sequence
  Synthetic oligonucleotide
ctatttaactccctcc

SEQ ID NO: 2218 - DNA, 16 bp, Artificial sequence
  Synthetic oligonucleotide
ctcgataaatgatagt

SEQ ID NO: 2219 - DNA, 16 bp, Artificial sequence
  Synthetic oligonucleotide
aggcatctagtaccta

SEQ ID NO: 2220 - DNA, 16 bp, Artificial sequence
  Synthetic oligonucleotide
atcccaaaagcgaccc

SEQ ID NO: 2221 - DNA, 16 bp, Artificial sequence
  Synthetic oligonucleotide
ctccttcatggtctcg

SEQ ID NO: 2222 - DNA, 16 bp, Artificial sequence
  Synthetic oligonucleotide
cgcgggccccggcctg

SEQ ID NO: 2223 - DNA, 16 bp, Artificial sequence
  Synthetic oligonucleotide
ttattaaactagggtc

SEQ ID NO: 2224 - DNA, 16 bp, Artificial sequence
  Synthetic oligonucleotide
gcgcacctccgccacc

SEQ ID NO: 2225 - DNA, 16 bp, Artificial sequence
  Synthetic oligonucleotide
ggcgggcctggaaggc

SEQ ID NO: 2226 - DNA, 16 bp, Artificial sequence
  Synthetic oligonucleotide
ggctgcaggcttcggc

SEQ ID NO: 2227 - DNA, 16 bp, Artificial sequence
  Synthetic oligonucleotide
atgaaacctggacctg

SEQ ID NO: 2228 - DNA, 16 bp, Artificial sequence
  Synthetic oligonucleotide
gaccagcaacgcagcc

SEQ ID NO: 2229 - DNA, 16 bp, Artificial sequence
  Synthetic oligonucleotide
gcccacagaaccttca

SEQ ID NO: 2230 - DNA, 16 bp, Artificial sequence
  Synthetic oligonucleotide
gcacggggtggcgtgg

SEQ ID NO: 2231 - DNA, 16 bp, Artificial sequence
  Synthetic oligonucleotide
tcaccccaggttagcc

SEQ ID NO: 2232 - DNA, 16 bp, Artificial sequence
  Synthetic oligonucleotide
ggtgaatctttattaa

SEQ ID NO: 2233 - DNA, 16 bp, Artificial sequence
  Synthetic oligonucleotide
cacatttaccaagccg

SEQ ID NO: 2234 - DNA, 16 bp, Artificial sequence
  Synthetic oligonucleotide
ctcctgagactacctg

SEQ ID NO: 2235 - DNA, 16 bp, Artificial sequence
  Synthetic oligonucleotide
ctccttggacagccgt

SEQ ID NO: 2236 - DNA, 16 bp, Artificial sequence
  Synthetic oligonucleotide
gtattcactatctgcc

SEQ ID NO: 2237 - DNA, 16 bp, Artificial sequence
  Synthetic oligonucleotide
gccgcttacgcagctt

SEQ ID NO: 2238 - DNA, 16 bp, Artificial sequence
  Synthetic oligonucleotide
tgcaacagcctaatcc

SEQ ID NO: 2239 - DNA, 16 bp, Artificial sequence
  Synthetic oligonucleotide
gcgcaggtaatcccaa

SEQ ID NO: 2240 - DNA, 16 bp, Artificial sequence
  Synthetic oligonucleotide
agcgacccagtgccag

SEQ ID NO: 2241 - DNA, 16 bp, Artificial sequence
  Synthetic oligonucleotide
gttcagtgattgtcgc

SEQ ID NO: 2242 - DNA, 16 bp, Artificial sequence
  Synthetic oligonucleotide
cggctagctaccgtgt

SEQ ID NO: 2243 - DNA, 16 bp, Artificial sequence
  Synthetic oligonucleotide
tctttctagaggcccc

SEQ ID NO: 2244 - DNA, 16 bp, Artificial sequence
  Synthetic oligonucleotide
gagcccacagtggcgg

SEQ ID NO: 2245 - DNA, 16 bp, Artificial sequence
  Synthetic oligonucleotide
ctaactcctatctcaa

SEQ ID NO: 2246 - DNA, 16 bp, Artificial sequence
  Synthetic oligonucleotide
tagaaccagcagagac

SEQ ID NO: 2247 - DNA, 16 bp, Artificial sequence
  Synthetic oligonucleotide
gtctcccgctgcaggc

SEQ ID NO: 2248 - DNA, 16 bp, Artificial sequence
  Synthetic oligonucleotide
gcctccatagaaaatt

SEQ ID NO: 2249 - DNA, 16 bp, Artificial sequence
  Synthetic oligonucleotide
atagccgcccaccagg

SEQ ID NO: 2250 - DNA, 16 bp, Artificial sequence
  Synthetic oligonucleotide
ctagggtccaccccag

SEQ ID NO: 2251 - DNA, 16 bp, Artificial sequence
  Synthetic oligonucleotide
ccaccgccggttccat

SEQ ID NO: 2252 - DNA, 16 bp, Artificial sequence
  Synthetic oligonucleotide
gcccggcccactggcg

SEQ ID NO: 2253 - DNA, 16 bp, Artificial sequence
  Synthetic oligonucleotide
gggacagggtctcccg

SEQ ID NO: 2254 - DNA, 16 bp, Artificial sequence
  Synthetic oligonucleotide
tggcgtggggtcgcat

SEQ ID NO: 2255 - DNA, 16 bp, Artificial sequence
  Synthetic oligonucleotide
tgaaacttggtgaatc

SEQ ID NO: 2256 - DNA, 16 bp, Artificial sequence
  Synthetic oligonucleotide
ccccaagacttagcga

SEQ ID NO: 2257 - DNA, 16 bp, Artificial sequence
  Synthetic oligonucleotide
caccccaggaggacgg

SEQ ID NO: 2258 - DNA, 16 bp, Artificial sequence
  Synthetic oligonucleotide
cctcacagttaagcgc

SEQ ID NO: 2259 - DNA, 16 bp, Artificial sequence
  Synthetic oligonucleotide
ggtcgcatggctgcag

SEQ ID NO: 2260 - DNA, 16 bp, Artificial sequence
  Synthetic oligonucleotide
ccccgactgcgcttct

SEQ ID NO: 2261 - DNA, 16 bp, Artificial sequence
  Synthetic oligonucleotide
ccaatcgacggctagc

SEQ ID NO: 2262 - DNA, 16 bp, Artificial sequence
  Synthetic oligonucleotide
gaccccgagtagctct

SEQ ID NO: 2263 - DNA, 16 bp, Artificial sequence
  Synthetic oligonucleotide
caacccattccctatt

SEQ ID NO: 2264 - DNA, 16 bp, Artificial sequence
  Synthetic oligonucleotide
ccagagagctaaagcc

SEQ ID NO: 2265 - DNA, 16 bp, Artificial sequence
  Synthetic oligonucleotide
ggcaggaggcacgggg

SEQ ID NO: 2266 - DNA, 16 bp, Artificial sequence
  Synthetic oligonucleotide
cattctaagctccaac

SEQ ID NO: 2267 - DNA, 16 bp, Artificial sequence
  Synthetic oligonucleotide
gaggacggctggggcg

SEQ ID NO: 2268 - DNA, 16 bp, Artificial sequence
  Synthetic oligonucleotide
ccccaacccggcctca

SEQ ID NO: 2269 - DNA, 16 bp, Artificial sequence
  Synthetic oligonucleotide
cgtcaaatcgctgttc

SEQ ID NO: 2270 - DNA, 16 bp, Artificial sequence
  Synthetic oligonucleotide
tggtacactgccaggc

SEQ ID NO: 2271 - DNA, 16 bp, Artificial sequence
  Synthetic oligonucleotide
gcacgcggccctgttc

SEQ ID NO: 2272 - DNA, 16 bp, Artificial sequence
  Synthetic oligonucleotide
gcttcggcgttcagtg

SEQ ID NO: 2273 - DNA, 16 bp, Artificial sequence
  Synthetic oligonucleotide
gcgcacccgcagctcc

SEQ ID NO: 2274 - DNA, 16 bp, Artificial sequence
  Synthetic oligonucleotide
gtgcagcggcctgaac

SEQ ID NO: 2275 - DNA, 16 bp, Artificial sequence
  Synthetic oligonucleotide
cagcggaaaagcatgt

SEQ ID NO: 2276 - DNA, 16 bp, Artificial sequence
  Synthetic oligonucleotide
ctggggcggggacagg

SEQ ID NO: 2277 - DNA, 16 bp, Artificial sequence
  Synthetic oligonucleotide
tggaacaagttcaagg

SEQ ID NO: 2278 - DNA, 16 bp, Artificial sequence
  Synthetic oligonucleotide
aatcaaccgccagtga

SEQ ID NO: 2279 - DNA, 16 bp, Artificial sequence
  Synthetic oligonucleotide
tcgccgcggtactgca

SEQ ID NO: 2280 - DNA, 16 bp, Artificial sequence
  Synthetic oligonucleotide
cttcccaggtccagtc

SEQ ID NO: 2281 - DNA, 16 bp, Artificial sequence
  Synthetic oligonucleotide
tgcgcggaggcaggag

SEQ ID NO: 2282 - DNA, 16 bp, Artificial sequence
  Synthetic oligonucleotide
gctcatccccgtgccc

SEQ ID NO: 2283 - DNA, 16 bp, Artificial sequence
  Synthetic oligonucleotide
ccaagccgcccccaac

SEQ ID NO: 2284 - DNA, 16 bp, Artificial sequence
  Synthetic oligonucleotide
ctgcaggctgcgcgga

SEQ ID NO: 2285 - DNA, 16 bp, Artificial sequence
  Synthetic oligonucleotide
ccccatacctgccagg

SEQ ID NO: 2286 - DNA, 16 bp, Artificial sequence
  Synthetic oligonucleotide
ccaagcccgaccccga

SEQ ID NO: 2287 - DNA, 16 bp, Artificial sequence
  Synthetic oligonucleotide
ttccaagccttgttgc

SEQ ID NO: 2288 - DNA, 16 bp, Artificial sequence
  Synthetic oligonucleotide
gagctaattcagtcct

SEQ ID NO: 2289 - DNA, 16 bp, Artificial sequence
  Synthetic oligonucleotide
tgcaccaggcggccgc

SEQ ID NO: 2290 - DNA, 16 bp, Artificial sequence
  Synthetic oligonucleotide
gcgcgcagccgctcgc

SEQ ID NO: 2291 - DNA, 16 bp, Artificial sequence
  Synthetic oligonucleotide
gcaacagcctaatccc

SEQ ID NO: 2292 - DNA, 16 bp, Artificial sequence
  Synthetic oligonucleotide
acatttaccaagccgc

SEQ ID NO: 2293 - DNA, 16 bp, Artificial sequence
  Synthetic oligonucleotide
caagcccgaccccgag

SEQ ID NO: 2294 - DNA, 16 bp, Artificial sequence
  Synthetic oligonucleotide
caagccgcccccaacc

SEQ ID NO: 2295 - DNA, 16 bp, Artificial sequence
  Synthetic oligonucleotide
accccaggaggacggc

SEQ ID NO: 2296 - DNA, 16 bp, Artificial sequence
  Synthetic oligonucleotide
gcgccctgcggccgag

SEQ ID NO: 2297 - DNA, 16 bp, Artificial sequence
  Synthetic oligonucleotide
taactcctatctcaag

SEQ ID NO: 2298 - DNA, 16 bp, Artificial sequence
  Synthetic oligonucleotide
ctccatgtccgcgccc

SEQ ID NO: 2299 - DNA, 16 bp, Artificial sequence
  Synthetic oligonucleotide
atcaaccgccagtgag

SEQ ID NO: 2300 - DNA, 16 bp, Artificial sequence
  Synthetic oligonucleotide
gcatctagtacctagg

SEQ ID NO: 2301 - DNA, 16 bp, Artificial sequence
  Synthetic oligonucleotide
ggaacaagttcaaggt

SEQ ID NO: 2302 - DNA, 16 bp, Artificial sequence
  Synthetic oligonucleotide
cgggccccggcctggt

SEQ ID NO: 2303 - DNA, 16 bp, Artificial sequence
  Synthetic oligonucleotide
ggagaaactgtcaatc

SEQ ID NO: 2304 - DNA, 16 bp, Artificial sequence
  Synthetic oligonucleotide
tattaaactagggtcc

SEQ ID NO: 2305 - DNA, 16 bp, Artificial sequence
  Synthetic oligonucleotide
cgcacccgcagctcct

SEQ ID NO: 2306 - DNA, 16 bp, Artificial sequence
  Synthetic oligonucleotide
cccatacctgccagga

SEQ ID NO: 2307 - DNA, 16 bp, Artificial sequence
  Synthetic oligonucleotide
ggcggcccgcacgcgg

SEQ ID NO: 2308 - DNA, 16 bp, Artificial sequence
  Synthetic oligonucleotide
caccgccggttccatc

SEQ ID NO: 2309 - DNA, 16 bp, Artificial sequence
  Synthetic oligonucleotide
ctttctagaggcccct

SEQ ID NO: 2310 - DNA, 16 bp, Artificial sequence
  Synthetic oligonucleotide
agctaattcagtcctc

SEQ ID NO: 2311 - DNA, 16 bp, Artificial sequence
  Synthetic oligonucleotide
aaccgagcaagccccg

SEQ ID NO: 2312 - DNA, 16 bp, Artificial sequence
  Synthetic oligonucleotide
cgggcctggaaggcct

SEQ ID NO: 2313 - DNA, 16 bp, Artificial sequence
  Synthetic oligonucleotide
gcgcggaggcaggagg

SEQ ID NO: 2314 - DNA, 16 bp, Artificial sequence
  Synthetic oligonucleotide
ttcagtgattgtcgct

SEQ ID NO: 2315 - DNA, 16 bp, Artificial sequence
  Synthetic oligonucleotide
caccccaggttagcct

SEQ ID NO: 2316 - DNA, 16 bp, Artificial sequence
  Synthetic oligonucleotide
gcgcagccgctcgccc

SEQ ID NO: 2317 - DNA, 16 bp, Artificial sequence
  Synthetic oligonucleotide
tagccgcccaccagga

SEQ ID NO: 2318 - DNA, 16 bp, Artificial sequence
  Synthetic oligonucleotide
gctgcaggcttcggcg

SEQ ID NO: 2319 - DNA, 16 bp, Artificial sequence
  Synthetic oligonucleotide
cctccatagaaaattc

SEQ ID NO: 2320 - DNA, 16 bp, Artificial sequence
  Synthetic oligonucleotide
gagagctaaagccagg

SEQ ID NO: 2321 - DNA, 16 bp, Artificial sequence
  Synthetic oligonucleotide
gaaacttggtgaatct

SEQ ID NO: 2322 - DNA, 16 bp, Artificial sequence
  Synthetic oligonucleotide
tgaaacctggacctgg

SEQ ID NO: 2323 - DNA, 16 bp, Artificial sequence
  Synthetic oligonucleotide
ccgcttacgcagcttg

SEQ ID NO: 2324 - DNA, 16 bp, Artificial sequence
  Synthetic oligonucleotide
gtcgcatggctgcagg

SEQ ID NO: 2325 - DNA, 16 bp, Artificial sequence
  Synthetic oligonucleotide
tccaagccttgttgca

SEQ ID NO: 2326 - DNA, 16 bp, Artificial sequence
  Synthetic oligonucleotide
gcaatgcattagaaac

SEQ ID NO: 2327 - DNA, 16 bp, Artificial sequence
  Synthetic oligonucleotide
cccaacccggcctcac

SEQ ID NO: 2328 - DNA, 16 bp, Artificial sequence
  Synthetic oligonucleotide
cacgcggccctgttcc

SEQ ID NO: 2329 - DNA, 16 bp, Artificial sequence
  Synthetic oligonucleotide
tcccaggtccagtccc

SEQ ID NO: 2330 - DNA, 16 bp, Artificial sequence
  Synthetic oligonucleotide
tcgcgggtccggctgc

SEQ ID NO: 2331 - DNA, 16 bp, Artificial sequence
  Synthetic oligonucleotide
gcaggaggcacggggt

SEQ ID NO: 2332 - DNA, 16 bp, Artificial sequence
  Synthetic oligonucleotide
cctgagactacctgga

SEQ ID NO: 2333 - DNA, 16 bp, Artificial sequence
  Synthetic oligonucleotide
tggcttacatcccagt

SEQ ID NO: 2334 - DNA, 16 bp, Artificial sequence
  Synthetic oligonucleotide
cagcggcctgaacatg

SEQ ID NO: 2335 - DNA, 16 bp, Artificial sequence
  Synthetic oligonucleotide
aggacggctggggcgg

SEQ ID NO: 2336 - DNA, 16 bp, Artificial sequence
  Synthetic oligonucleotide
catccccgtgcccccg

SEQ ID NO: 2337 - DNA, 16 bp, Artificial sequence
  Synthetic oligonucleotide
cccgactgcgcttctc

SEQ ID NO: 2338 - DNA, 16 bp, Artificial sequence
  Synthetic oligonucleotide
tcccaaaagcgaccca

SEQ ID NO: 2339 - DNA, 16 bp, Artificial sequence
  Synthetic oligonucleotide
gccgcggtactgcacc

SEQ ID NO: 2340 - DNA, 16 bp, Artificial sequence
  Synthetic oligonucleotide
ggacagggtctcccgc

SEQ ID NO: 2341 - DNA, 16 bp, Artificial sequence
  Synthetic oligonucleotide
cccaagacttagcgac

SEQ ID NO: 2342 - DNA, 16 bp, Artificial sequence
  Synthetic oligonucleotide
tttaactccctcctgg

SEQ ID NO: 2343 - DNA, 16 bp, Artificial sequence
  Synthetic oligonucleotide
tgaatctttattaaac

SEQ ID NO: 2344 - DNA, 16 bp, Artificial sequence
  Synthetic oligonucleotide
tctcccgctgcaggct

SEQ ID NO: 2345 - DNA, 16 bp, Artificial sequence
  Synthetic oligonucleotide
cgcaggtaatcccaaa

SEQ ID NO: 2346 - DNA, 16 bp, Artificial sequence
  Synthetic oligonucleotide
tcgataaatgatagtg

SEQ ID NO: 2347 - DNA, 16 bp, Artificial sequence
  Synthetic oligonucleotide
ccagcaacgcagccca

SEQ ID NO: 2348 - DNA, 16 bp, Artificial sequence
  Synthetic oligonucleotide
tgcaggctgcgcggag

SEQ ID NO: 2349 - DNA, 16 bp, Artificial sequence
  Synthetic oligonucleotide
gtcaaatcgctgttca

SEQ ID NO: 2350 - DNA, 16 bp, Artificial sequence
  Synthetic oligonucleotide
aggtcatcggcatcgc

SEQ ID NO: 2351 - DNA, 16 bp, Artificial sequence
  Synthetic oligonucleotide
cttcggcgttcagtga

SEQ ID NO: 2352 - DNA, 16 bp, Artificial sequence
  Synthetic oligonucleotide
tggggcggggacaggg

SEQ ID NO: 2353 - DNA, 16 bp, Artificial sequence
  Synthetic oligonucleotide
gaaccagcagagaccc

SEQ ID NO: 2354 - DNA, 16 bp, Artificial sequence
  Synthetic oligonucleotide
caatcgacggctagct

SEQ ID NO: 2355 - DNA, 16 bp, Artificial sequence
  Synthetic oligonucleotide
gcggaaaagcatgtat

SEQ ID NO: 2356 - DNA, 16 bp, Artificial sequence
  Synthetic oligonucleotide
gcgccgtgttccattt

SEQ ID NO: 2357 - DNA, 16 bp, Artificial sequence
  Synthetic oligonucleotide
ggctagctaccgtgtc

SEQ ID NO: 2358 - DNA, 16 bp, Artificial sequence
  Synthetic oligonucleotide
ggcgtggggtcgcatg

SEQ ID NO: 2359 - DNA, 16 bp, Artificial sequence
  Synthetic oligonucleotide
ttggacagccgtgccc

SEQ ID NO: 2360 - DNA, 16 bp, Artificial sequence
  Synthetic oligonucleotide
attctaagctccaacc

SEQ ID NO: 2361 - DNA, 16 bp, Artificial sequence
  Synthetic oligonucleotide
tagggtccaccccagg

SEQ ID NO: 2362 - DNA, 16 bp, Artificial sequence
  Synthetic oligonucleotide
cacggggtggcgtggg

SEQ ID NO: 2363 - DNA, 16 bp, Artificial sequence
  Synthetic oligonucleotide
accccgagtagctctc

SEQ ID NO: 2364 - DNA, 16 bp, Artificial sequence
  Synthetic oligonucleotide
tctaactcccagccag

SEQ ID NO: 2365 - DNA, 16 bp, Artificial sequence
  Synthetic oligonucleotide
cccggcccactggcgc

SEQ ID NO: 2366 - DNA, 16 bp, Artificial sequence
  Synthetic oligonucleotide
gcgacccagtgccagt

SEQ ID NO: 2367 - DNA, 16 bp, Artificial sequence
  Synthetic oligonucleotide
aacccattccctattt

SEQ ID NO: 2368 - DNA, 16 bp, Artificial sequence
  Synthetic oligonucleotide
gaaactgtcaatcaac

SEQ ID NO: 2369 - DNA, 16 bp, Artificial sequence
  Synthetic oligonucleotide
tcaaatcgctgttcag

SEQ ID NO: 2370 - DNA, 16 bp, Artificial sequence
  Synthetic oligonucleotide
attaaactagggtcca

SEQ ID NO: 2371 - DNA, 16 bp, Artificial sequence
  Synthetic oligonucleotide
gaacaagttcaaggtg

SEQ ID NO: 2372 - DNA, 16 bp, Artificial sequence
  Synthetic oligonucleotide
accgccggttccatct

SEQ ID NO: 2373 - DNA, 16 bp, Artificial sequence
  Synthetic oligonucleotide
cgcttacgcagcttgc

SEQ ID NO: 2374 - DNA, 16 bp, Artificial sequence
  Synthetic oligonucleotide
gggccccggcctggta

SEQ ID NO: 2375 - DNA, 16 bp, Artificial sequence
  Synthetic oligonucleotide
gctaattcagtcctca

SEQ ID NO: 2376 - DNA, 16 bp, Artificial sequence
  Synthetic oligonucleotide
agctaaagccaggagt

SEQ ID NO: 2377 - DNA, 16 bp, Artificial sequence
  Synthetic oligonucleotide
ccccgagtagctctcc

SEQ ID NO: 2378 - DNA, 16 bp, Artificial sequence
  Synthetic oligonucleotide
acggggtggcgtgggg

SEQ ID NO: 2379 - DNA, 16 bp, Artificial sequence
  Synthetic oligonucleotide
ggtcatcggcatcgcg

SEQ ID NO: 2380 - DNA, 16 bp, Artificial sequence
  Synthetic oligonucleotide
gaatctttattaaact

SEQ ID NO: 2381 - DNA, 16 bp, Artificial sequence
  Synthetic oligonucleotide
ctcaccggctcctggg

SEQ ID NO: 2382 - DNA, 16 bp, Artificial sequence
  Synthetic oligonucleotide
tcaaccgccagtgagg

SEQ ID NO: 2383 - DNA, 16 bp, Artificial sequence
  Synthetic oligonucleotide
caacagcctaatccca

SEQ ID NO: 2384 - DNA, 16 bp, Artificial sequence
  Synthetic oligonucleotide
ctccatccgcgcgcgc

SEQ ID NO: 2385 - DNA, 16 bp, Artificial sequence
  Synthetic oligonucleotide
caggtaatcccaaaag

SEQ ID NO: 2386 - DNA, 16 bp, Artificial sequence
  Synthetic oligonucleotide
cagccgctcgccccag

SEQ ID NO: 2387 - DNA, 16 bp, Artificial sequence
  Synthetic oligonucleotide
gctcgaaccagctctt

SEQ ID NO: 2388 - DNA, 16 bp, Artificial sequence
  Synthetic oligonucleotide
cacccgcagctcctcg

SEQ ID NO: 2389 - DNA, 16 bp, Artificial sequence
  Synthetic oligonucleotide
ggacggctggggcggg

SEQ ID NO: 2390 - DNA, 16 bp, Artificial sequence
  Synthetic oligonucleotide
gtccgcgcccagccgg

SEQ ID NO: 2391 - DNA, 16 bp, Artificial sequence
  Synthetic oligonucleotide
catttaccaagccgcc

SEQ ID NO: 2392 - DNA, 16 bp, Artificial sequence
  Synthetic oligonucleotide
ccatacctgccaggaa

SEQ ID NO: 2393 - DNA, 16 bp, Artificial sequence
  Synthetic oligonucleotide
ctcccgctgcaggctg

SEQ ID NO: 2394 - DNA, 16 bp, Artificial sequence
  Synthetic oligonucleotide
caagccttgttgcatt

SEQ ID NO: 2395 - DNA, 16 bp, Artificial sequence
  Synthetic oligonucleotide
ctagctaccgtgtcgc

SEQ ID NO: 2396 - DNA, 16 bp, Artificial sequence
  Synthetic oligonucleotide
ggggcggggacagggt

SEQ ID NO: 2397 - DNA, 16 bp, Artificial sequence
  Synthetic oligonucleotide
catcttcctctcccgg

SEQ ID NO: 2398 - DNA, 16 bp, Artificial sequence
  Synthetic oligonucleotide
atccccgtgcccccga

SEQ ID NO: 2399 - DNA, 16 bp, Artificial sequence
  Synthetic oligonucleotide
ctcacccccgctcctc

SEQ ID NO: 2400 - DNA, 16 bp, Artificial sequence
  Synthetic oligonucleotide
ttaactccctcctggt

SEQ ID NO: 2401 - DNA, 16 bp, Artificial sequence
  Synthetic oligonucleotide
aatcgacggctagcta

SEQ ID NO: 2402 - DNA, 16 bp, Artificial sequence
  Synthetic oligonucleotide
aactcctatctcaagg

SEQ ID NO: 2403 - DNA, 16 bp, Artificial sequence
  Synthetic oligonucleotide
caggaggcacggggtg

SEQ ID NO: 2404 - DNA, 16 bp, Artificial sequence
  Synthetic oligonucleotide
ttccatttatgagcta

SEQ ID NO: 2405 - DNA, 16 bp, Artificial sequence
  Synthetic oligonucleotide
gcggcccgcacgcggc

SEQ ID NO: 2406 - DNA, 16 bp, Artificial sequence
  Synthetic oligonucleotide
ggacagccgtgcccgc

SEQ ID NO: 2407 - DNA, 16 bp, Artificial sequence
  Synthetic oligonucleotide
ccgcggtactgcacca

SEQ ID NO: 2408 - DNA, 16 bp, Artificial sequence
  Synthetic oligonucleotide
acgcggccctgttcca

SEQ ID NO: 2409 - DNA, 16 bp, Artificial sequence
  Synthetic oligonucleotide
ccaacccggcctcacc

SEQ ID NO: 2410 - DNA, 16 bp, Artificial sequence
  Synthetic oligonucleotide
accgagcaagccccgc

SEQ ID NO: 2411 - DNA, 16 bp, Artificial sequence
  Synthetic oligonucleotide
acccattccctattta

SEQ ID NO: 2412 - DNA, 16 bp, Artificial sequence
  Synthetic oligonucleotide
cgataaatgatagtga

SEQ ID NO: 2413 - DNA, 16 bp, Artificial sequence
  Synthetic oligonucleotide
cccaaaagcgacccag

SEQ ID NO: 2414 - DNA, 16 bp, Artificial sequence
  Synthetic oligonucleotide
cggaaaagcatgtatt

SEQ ID NO: 2415 - DNA, 16 bp, Artificial sequence
  Synthetic oligonucleotide
gcggccgagagggcgg

SEQ ID NO: 2416 - DNA, 16 bp, Artificial sequence
  Synthetic oligonucleotide
caatgcattagaaacc

SEQ ID NO: 2417 - DNA, 16 bp, Artificial sequence
  Synthetic oligonucleotide
tcgcatggctgcaggc

SEQ ID NO: 2418 - DNA, 16 bp, Artificial sequence
  Synthetic oligonucleotide
aagccgcccccaaccc

SEQ ID NO: 2419 - DNA, 16 bp, Artificial sequence
  Synthetic oligonucleotide
gcttacatcccagtcc

SEQ ID NO: 2420 - DNA, 16 bp, Artificial sequence
  Synthetic oligonucleotide
cgcggaggcaggaggc

SEQ ID NO: 2421 - DNA, 16 bp, Artificial sequence
  Synthetic oligonucleotide
gccgcccaccaggagg

SEQ ID NO: 2422 - DNA, 16 bp, Artificial sequence
  Synthetic oligonucleotide
ggaggtatagccgccc

SEQ ID NO: 2423 - DNA, 16 bp, Artificial sequence
  Synthetic oligonucleotide
tgagactacctggagg

SEQ ID NO: 2424 - DNA, 16 bp, Artificial sequence
  Synthetic oligonucleotide
caagacttagcgacag

SEQ ID NO: 2425 - DNA, 16 bp, Artificial sequence
  Synthetic oligonucleotide
cagcaacgcagcccac

SEQ ID NO: 2426 - DNA, 16 bp, Artificial sequence
  Synthetic oligonucleotide
ccccaggaggacggct

SEQ ID NO: 2427 - DNA, 16 bp, Artificial sequence
  Synthetic oligonucleotide
ccaggttagccttcca

SEQ ID NO: 2428 - DNA, 16 bp, Artificial sequence
  Synthetic oligonucleotide
tcagtgattgtcgctg

SEQ ID NO: 2429 - DNA, 16 bp, Artificial sequence
  Synthetic oligonucleotide
agggtccaccccagga

SEQ ID NO: 2430 - DNA, 16 bp, Artificial sequence
  Synthetic oligonucleotide
aagcccgaccccgagt

SEQ ID NO: 2431 - DNA, 16 bp, Artificial sequence
  Synthetic oligonucleotide
ggcctggaaggcctcg

SEQ ID NO: 2432 - DNA, 16 bp, Artificial sequence
  Synthetic oligonucleotide
gacagggtctcccgct

SEQ ID NO: 2433 - DNA, 16 bp, Artificial sequence
  Synthetic oligonucleotide
ctgcaggcttcggcgt

SEQ ID NO: 2434 - DNA, 16 bp, Artificial sequence
  Synthetic oligonucleotide
caggccccccaagact

SEQ ID NO: 2435 - DNA, 16 bp, Artificial sequence
  Synthetic oligonucleotide
gcggcctgaacatggt

SEQ ID NO: 2436 - DNA, 16 bp, Artificial sequence
  Synthetic oligonucleotide
aaacttggtgaatctt

SEQ ID NO: 2437 - DNA, 16 bp, Artificial sequence
  Synthetic oligonucleotide
ttctaagctccaacct

SEQ ID NO: 2438 - DNA, 16 bp, Artificial sequence
  Synthetic oligonucleotide
gcaggctgcgcggagg

SEQ ID NO: 2439 - DNA, 16 bp, Artificial sequence
  Synthetic oligonucleotide
taactcccagccaggt

SEQ ID NO: 2440 - DNA, 16 bp, Artificial sequence
  Synthetic oligonucleotide
gcgtggggtcgcatgg

SEQ ID NO: 2441 - DNA, 16 bp, Artificial sequence
  Synthetic oligonucleotide
catctagtacctaggg

SEQ ID NO: 2442 - DNA, 16 bp, Artificial sequence
  Synthetic oligonucleotide
ttcggcgttcagtgat

SEQ ID NO: 2443 - DNA, 16 bp, Artificial sequence
  Synthetic oligonucleotide
cgacccagtgccagtt

SEQ ID NO: 2444 - DNA, 16 bp, Artificial sequence
  Synthetic oligonucleotide
tttctagaggcccctg

SEQ ID NO: 2445 - DNA, 16 bp, Artificial sequence
  Synthetic oligonucleotide
aagacttagcgacagg

SEQ ID NO: 2446 - DNA, 16 bp, Artificial sequence
  Synthetic oligonucleotide
atgcattagaaacctc

SEQ ID NO: 2447 - DNA, 16 bp, Artificial sequence
  Synthetic oligonucleotide
gggcggggacagggtc

SEQ ID NO: 2448 - DNA, 16 bp, Artificial sequence
  Synthetic oligonucleotide
agccttgttgcattat

SEQ ID NO: 2449 - DNA, 16 bp, Artificial sequence
  Synthetic oligonucleotide
aacttggtgaatcttt

SEQ ID NO: 2450 - DNA, 16 bp, Artificial sequence
  Synthetic oligonucleotide
acagaaggtgctccac

SEQ ID NO: 2451 - DNA, 16 bp, Artificial sequence
  Synthetic oligonucleotide
aatctttattaaacta

SEQ ID NO: 2452 - DNA, 16 bp, Artificial sequence
  Synthetic oligonucleotide
taagctccaacctcac

SEQ ID NO: 2453 - DNA, 16 bp, Artificial sequence
  Synthetic oligonucleotide
ctccagttccgatttg

SEQ ID NO: 2454 - DNA, 16 bp, Artificial sequence
  Synthetic oligonucleotide
agccgctcgccccagg

SEQ ID NO: 2455 - DNA, 16 bp, Artificial sequence
  Synthetic oligonucleotide
caaatcgctgttcaga

SEQ ID NO: 2456 - DNA, 16 bp, Artificial sequence
  Synthetic oligonucleotide
aggccccccaagactt

SEQ ID NO: 2457 - DNA, 16 bp, Artificial sequence
  Synthetic oligonucleotide
catacctgccaggaat

SEQ ID NO: 2458 - DNA, 16 bp, Artificial sequence
  Synthetic oligonucleotide
cgcggtactgcaccag

SEQ ID NO: 2459 - DNA, 16 bp, Artificial sequence
  Synthetic oligonucleotide
tgggagatcgaaacgg

SEQ ID NO: 2460 - DNA, 16 bp, Artificial sequence
  Synthetic oligonucleotide
aaactgtcaatcaacc

SEQ ID NO: 2461 - DNA, 16 bp, Artificial sequence
  Synthetic oligonucleotide
cagtgattgtcgctgg

SEQ ID NO: 2462 - DNA, 16 bp, Artificial sequence
  Synthetic oligonucleotide
cgtggggtcgcatggc

SEQ ID NO: 2463 - DNA, 16 bp, Artificial sequence
  Synthetic oligonucleotide
gagactacctggaggc

SEQ ID NO: 2464 - DNA, 16 bp, Artificial sequence
  Synthetic oligonucleotide
ggccccggcctggtac

SEQ ID NO: 2465 - DNA, 16 bp, Artificial sequence
  Synthetic oligonucleotide
ccatccgcgcgcgcag

SEQ ID NO: 2466 - DNA, 16 bp, Artificial sequence
  Synthetic oligonucleotide
actcctatctcaagga

SEQ ID NO: 2467 - DNA, 16 bp, Artificial sequence
  Synthetic oligonucleotide
tagctaccgtgtcgct

SEQ ID NO: 2468 - DNA, 16 bp, Artificial sequence
  Synthetic oligonucleotide
ctcgaaccagctcttg

SEQ ID NO: 2469 - DNA, 16 bp, Artificial sequence
  Synthetic oligonucleotide
tgcaggcttcggcgtt

SEQ ID NO: 2470 - DNA, 16 bp, Artificial sequence
  Synthetic oligonucleotide
tcggcgttcagtgatt

SEQ ID NO: 2471 - DNA, 16 bp, Artificial sequence
  Synthetic oligonucleotide
ccgccggttccatctc

SEQ ID NO: 2472 - DNA, 16 bp, Artificial sequence
  Synthetic oligonucleotide
agcaacgcagcccaca

SEQ ID NO: 2473 - DNA, 16 bp, Artificial sequence
  Synthetic oligonucleotide
acagggtctcccgctg

SEQ ID NO: 2474 - DNA, 16 bp, Artificial sequence
  Synthetic oligonucleotide
gacggctggggcgggg

SEQ ID NO: 2475 - DNA, 16 bp, Artificial sequence
  Synthetic oligonucleotide
cttcacctccgctggg

SEQ ID NO: 2476 - DNA, 16 bp, Artificial sequence
  Synthetic oligonucleotide
aacagcctaatcccag

SEQ ID NO: 2477 - DNA, 16 bp, Artificial sequence
  Synthetic oligonucleotide
ccattccctatttaac

SEQ ID NO: 2478 - DNA, 16 bp, Artificial sequence
  Synthetic oligonucleotide
agccgcccccaaccca

SEQ ID NO: 2479 - DNA, 16 bp, Artificial sequence
  Synthetic oligonucleotide
cggcccgcacgcggcc

SEQ ID NO: 2480 - DNA, 16 bp, Artificial sequence
  Synthetic oligonucleotide
tcaaattccatccccc

SEQ ID NO: 2481 - DNA, 16 bp, Artificial sequence
  Synthetic oligonucleotide
tcccgctgcaggctgc

SEQ ID NO: 2482 - DNA, 16 bp, Artificial sequence
  Synthetic oligonucleotide
tccccgtgcccccgac

SEQ ID NO: 2483 - DNA, 16 bp, Artificial sequence
  Synthetic oligonucleotide
cccaggaggacggctg

SEQ ID NO: 2484 - DNA, 16 bp, Artificial sequence
  Synthetic oligonucleotide
taactccctcctggtc

SEQ ID NO: 2485 - DNA, 16 bp, Artificial sequence
  Synthetic oligonucleotide
caggttagccttccaa

SEQ ID NO: 2486 - DNA, 16 bp, Artificial sequence
  Synthetic oligonucleotide
cgcatggctgcaggct

SEQ ID NO: 2487 - DNA, 16 bp, Artificial sequence
  Synthetic oligonucleotide
acccgcagctcctcgg

SEQ ID NO: 2488 - DNA, 16 bp, Artificial sequence
  Synthetic oligonucleotide
gatcacagctgccccg

SEQ ID NO: 2489 - DNA, 16 bp, Artificial sequence
  Synthetic oligonucleotide
ccgcccaccaggaggg

SEQ ID NO: 2490 - DNA, 16 bp, Artificial sequence
  Synthetic oligonucleotide
ttaaactagggtccac

SEQ ID NO: 2491 - DNA, 16 bp, Artificial sequence
  Synthetic oligonucleotide
gctaaagccaggagtc

SEQ ID NO: 2492 - DNA, 16 bp, Artificial sequence
  Synthetic oligonucleotide
atttaccaagccgccc

SEQ ID NO: 2493 - DNA, 16 bp, Artificial sequence
  Synthetic oligonucleotide
caggctgcgcggaggc

SEQ ID NO: 2494 - DNA, 16 bp, Artificial sequence
  Synthetic oligonucleotide
atgatagtgacaactc

SEQ ID NO: 2495 - DNA, 16 bp, Artificial sequence
  Synthetic oligonucleotide
ttctagaggcccctga

SEQ ID NO: 2496 - DNA, 16 bp, Artificial sequence
  Synthetic oligonucleotide
gaggtatagccgccca

SEQ ID NO: 2497 - DNA, 16 bp, Artificial sequence
  Synthetic oligonucleotide
cggggtggcgtggggt

SEQ ID NO: 2498 - DNA, 16 bp, Artificial sequence
  Synthetic oligonucleotide
atcgacggctagctac

SEQ ID NO: 2499 - DNA, 16 bp, Artificial sequence
  Synthetic oligonucleotide
aggaggcacggggtgg

SEQ ID NO: 2500 - DNA, 16 bp, Artificial sequence
  Synthetic oligonucleotide
gcagagacgaagaagg

SEQ ID NO: 2501 - DNA, 16 bp, Artificial sequence
  Synthetic oligonucleotide
ctctccccaagcccga

SEQ ID NO: 2502 - DNA, 16 bp, Artificial sequence
  Synthetic oligonucleotide
ccagtgaggactcctc

SEQ ID NO: 2503 - DNA, 16 bp, Artificial sequence
  Synthetic oligonucleotide
tcgcggaggagccgct

SEQ ID NO: 2504 - DNA, 16 bp, Artificial sequence
  Synthetic oligonucleotide
cttacgcagcttgcgc

SEQ ID NO: 2505 - DNA, 16 bp, Artificial sequence
  Synthetic oligonucleotide
gcctggaaggcctcgg

SEQ ID NO: 2506 - DNA, 16 bp, Artificial sequence
  Synthetic oligonucleotide
agcccgaccccgagta

SEQ ID NO: 2507 - DNA, 16 bp, Artificial sequence
  Synthetic oligonucleotide
cccgagtagctctcct

SEQ ID NO: 2508 - DNA, 16 bp, Artificial sequence
  Synthetic oligonucleotide
cgagcaagccccgccc

SEQ ID NO: 2509 - DNA, 16 bp, Artificial sequence
  Synthetic oligonucleotide
ccagccgggcctgcgc

SEQ ID NO: 2510 - DNA, 16 bp, Artificial sequence
  Synthetic oligonucleotide
ccaaaagcgacccagt

SEQ ID NO: 2511 - DNA, 16 bp, Artificial sequence
  Synthetic oligonucleotide
gcggaggcaggaggca

SEQ ID NO: 2512 - DNA, 16 bp, Artificial sequence
  Synthetic oligonucleotide
gggtccaccccaggag

SEQ ID NO: 2513 - DNA, 16 bp, Artificial sequence
  Synthetic oligonucleotide
cgcggccctgttccac

SEQ ID NO: 2514 - DNA, 16 bp, Artificial sequence
  Synthetic oligonucleotide
ttaaagttctccaatc

SEQ ID NO: 2515 - DNA, 16 bp, Artificial sequence
  Synthetic oligonucleotide
cttacatcccagtcca

SEQ ID NO: 2516 - DNA, 16 bp, Artificial sequence
  Synthetic oligonucleotide
caacccggcctcaccc

SEQ ID NO: 2517 - DNA, 16 bp, Artificial sequence
  Synthetic oligonucleotide
tgccagttcccagcgc

SEQ ID NO: 2518 - DNA, 16 bp, Artificial sequence
  Synthetic oligonucleotide
aggtaatcccaaaagc

SEQ ID NO: 2519 - DNA, 16 bp, Artificial sequence
  Synthetic oligonucleotide
tccatttatgagctaa

SEQ ID NO: 2520 - DNA, 16 bp, Artificial sequence
  Synthetic oligonucleotide
cggcctgaacatggtt

SEQ ID NO: 2521 - DNA, 16 bp, Artificial sequence
  Synthetic oligonucleotide
tgaccccgtccaggca

SEQ ID NO: 2522 - DNA, 20 bp, Artificial sequence
  Synthetic oligonucleotide
cctcattttaaagttctcca

SEQ ID NO: 2523 - DNA, 20 bp, Artificial sequence
  Synthetic oligonucleotide
cctcattctcccttcacatt

SEQ ID NO: 2524 - DNA, 20 bp, Artificial sequence
  Synthetic oligonucleotide
gggacacccagtaggtgctc

SEQ ID NO: 2525 - DNA, 20 bp, Artificial sequence
  Synthetic oligonucleotide
ttcctcattctcccttcaca

SEQ ID NO: 2526 - DNA, 20 bp, Artificial sequence
  Synthetic oligonucleotide
gagctaattcagtcctcatt

SEQ ID NO: 2527 - DNA, 20 bp, Artificial sequence
  Synthetic oligonucleotide
tcctcattctcccttcacat

SEQ ID NO: 2528 - DNA, 20 bp, Artificial sequence
  Synthetic oligonucleotide
ctccaatcgacggctagcta

SEQ ID NO: 2529 - DNA, 20 bp, Artificial sequence
  Synthetic oligonucleotide
tgagctaattcagtcctcat

SEQ ID NO: 2530 - DNA, 20 bp, Artificial sequence
  Synthetic oligonucleotide
cattcctcattctcccttca

SEQ ID NO: 2531 - DNA, 20 bp, Artificial sequence
  Synthetic oligonucleotide
gcattcctcattctcccttc

SEQ ID NO: 2532 - DNA, 16 bp, Artificial sequence
  Synthetic oligonucleotide
gaagctagaaccagca

SEQ ID NO: 2533 - DNA, 16 bp, Artificial sequence
  Synthetic oligonucleotide
gtttaatcacttggaa

SEQ ID NO: 2534 - DNA, 16 bp, Artificial sequence
  Synthetic oligonucleotide
ccaattatagggctcc

SEQ ID NO: 2535 - DNA, 17 bp, Artificial sequence
  Synthetic oligonucleotide
gtgaatctttattaaac

SEQ ID NO: 2536 - DNA, 17 bp, Artificial sequence
  Synthetic oligonucleotide
cctcattttaaagttct

SEQ ID NO: 2537 - DNA, 17 bp, Artificial sequence
  Synthetic oligonucleotide
cacatttaccaagccgc

SEQ ID NO: 2538 - DNA, 17 bp, Artificial sequence
  Synthetic oligonucleotide
gcacatttaccaagccg

SEQ ID NO: 2539 - DNA, 17 bp, Artificial sequence
  Synthetic oligonucleotide
cagcacatttaccaagc

SEQ ID NO: 2540 - DNA, 17 bp, Artificial sequence
  Synthetic oligonucleotide
catttatgagctaattc

SEQ ID NO: 2541 - DNA, 17 bp, Artificial sequence
  Synthetic oligonucleotide
ccatttatgagctaatt

SEQ ID NO: 2542 - DNA, 17 bp, Artificial sequence
  Synthetic oligonucleotide
tccatttatgagctaat

SEQ ID NO: 2543 - DNA, 17 bp, Artificial sequence
  Synthetic oligonucleotide
ttccatttatgagctaa

SEQ ID NO: 2544 - DNA, 17 bp, Artificial sequence
  Synthetic oligonucleotide
ggtgaatctttattaaa

SEQ ID NO: 2545 - DNA, 17 bp, Artificial sequence
  Synthetic oligonucleotide
gagctaattcagtcctc

SEQ ID NO: 2546 - DNA, 17 bp, Artificial sequence
  Synthetic oligonucleotide
tgagctaattcagtcct

SEQ ID NO: 2547 - DNA, 17 bp, Artificial sequence
  Synthetic oligonucleotide
atgagctaattcagtcc

SEQ ID NO: 2548 - DNA, 17 bp, Artificial sequence
  Synthetic oligonucleotide
tatgagctaattcagtc

SEQ ID NO: 2549 - DNA, 17 bp, Artificial sequence
  Synthetic oligonucleotide
cattttaaagttctcca

SEQ ID NO: 2550 - DNA, 17 bp, Artificial sequence
  Synthetic oligonucleotide
tcattttaaagttctcc

SEQ ID NO: 2551 - DNA, 17 bp, Artificial sequence
  Synthetic oligonucleotide
ctcattttaaagttctc

SEQ ID NO: 2552 - RNA, 23 nt, Artificial sequence
  Synthetic oligonucleotide
ucaccuccgcuggggcugaguag

SEQ ID NO: 2553 - RNA, 23 nt, Artificial sequence
  Synthetic oligonucleotide
augugaccagcaacgcagcccac

SEQ ID NO: 2554 - RNA, 23 nt, Artificial sequence
  Synthetic oligonucleotide
cacagaaccuucaucuuccugcc

SEQ ID NO: 2555 - RNA, 23 nt, Artificial sequence
  Synthetic oligonucleotide
cuccuggggaaggacguccuuca

SEQ ID NO: 2556 - RNA, 23 nt, Artificial sequence
  Synthetic oligonucleotide
ggccuggcauccugccaggaaug

SEQ ID NO: 2557 - RNA, 23 nt, Artificial sequence
  Synthetic oligonucleotide
uccaccgcuugcuccaccuuggc

SEQ ID NO: 2558 - RNA, 23 nt, Artificial sequence
  Synthetic oligonucleotide
cacccagcgcagguaaucccaaa

SEQ ID NO: 2559 - RNA, 23 nt, Artificial sequence
  Synthetic oligonucleotide
aaaagcgacccagugccaguucc

SEQ ID NO: 2560 - RNA, 23 nt, Artificial sequence
  Synthetic oligonucleotide
ucccagcgcuggccgcucugcca

SEQ ID NO: 2561 - RNA, 23 nt, Artificial sequence
  Synthetic oligonucleotide
ccacucggucugcuggcgcagcu

SEQ ID NO: 2562 - RNA, 23 nt, Artificial sequence
  Synthetic oligonucleotide
gcucgggcuccggcucugucucc

SEQ ID NO: 2563 - RNA, 23 nt, Artificial sequence
  Synthetic oligonucleotide
accugcucagacagugucugcac

SEQ ID NO: 2564 - RNA, 23 nt, Artificial sequence
  Synthetic oligonucleotide
aggccuucaacuccuucaugguc

SEQ ID NO: 2565 - RNA, 23 nt, Artificial sequence
  Synthetic oligonucleotide
gucucguccaucagcgcccucag

SEQ ID NO: 2566 - RNA, 23 nt, Artificial sequence
  Synthetic oligonucleotide
agcugagcagcuccuccugcacc

SEQ ID NO: 2567 - RNA, 23 nt, Artificial sequence
  Synthetic oligonucleotide
caguuccugggugaccugggagc

SEQ ID NO: 2568 - RNA, 23 nt, Artificial sequence
  Synthetic oligonucleotide
uuccuccaguuccgauuuguagg

SEQ ID NO: 2569 - RNA, 23 nt, Artificial sequence
  Synthetic oligonucleotide
uccgccaccggggucaguuguuc

SEQ ID NO: 2570 - RNA, 23 nt, Artificial sequence
  Synthetic oligonucleotide
gccgcgguacugcaccaggcggc

SEQ ID NO: 2571 - RNA, 23 nt, Artificial sequence
  Synthetic oligonucleotide
ggccgcacacguccuccaugucc

SEQ ID NO: 2572 - RNA, 23 nt, Artificial sequence
  Synthetic oligonucleotide
uccgcgcccagccgggccugcgc

SEQ ID NO: 2573 - RNA, 23 nt, Artificial sequence
  Synthetic oligonucleotide
cgccgccugcagcuccuuggaca

SEQ ID NO: 2574 - RNA, 23 nt, Artificial sequence
  Synthetic oligonucleotide
acagccgugcccgcgucuccucc

SEQ ID NO: 2575 - RNA, 23 nt, Artificial sequence
  Synthetic oligonucleotide
ccgagcauggccugcaccucgcc

SEQ ID NO: 2576 - RNA, 23 nt, Artificial sequence
  Synthetic oligonucleotide
ugccaggcgcuucugcaggucau

SEQ ID NO: 2577 - RNA, 23 nt, Artificial sequence
  Synthetic oligonucleotide
caucggcaucgcggaggagccgc

SEQ ID NO: 2578 - RNA, 23 nt, Artificial sequence
  Synthetic oligonucleotide
cgcuuacgcagcuugcgcaggug

SEQ ID NO: 2579 - RNA, 23 nt, Artificial sequence
  Synthetic oligonucleotide
gugggaggcgaggcgcacccgca

SEQ ID NO: 2580 - RNA, 23 nt, Artificial sequence
  Synthetic oligonucleotide
gcagcuccucggugcucuggccg

SEQ ID NO: 2581 - RNA, 23 nt, Artificial sequence
  Synthetic oligonucleotide
cgggccccggccugguacacugc

SEQ ID NO: 2582 - RNA, 23 nt, Artificial sequence
  Synthetic oligonucleotide
uggcggcccgcacgcggcccugu

SEQ ID NO: 2583 - RNA, 23 nt, Artificial sequence
  Synthetic oligonucleotide
uguuccaccaggggccccaggcg

SEQ ID NO: 2584 - RNA, 23 nt, Artificial sequence
  Synthetic oligonucleotide
gcgcucgcggauggcgcugaggc

SEQ ID NO: 2585 - RNA, 23 nt, Artificial sequence
  Synthetic oligonucleotide
ggccgcgcucggcgcccucgcgg

SEQ ID NO: 2586 - RNA, 23 nt, Artificial sequence
  Synthetic oligonucleotide
gccggccagggagcccacagugg

SEQ ID NO: 2587 - RNA, 23 nt, Artificial sequence
  Synthetic oligonucleotide
gcccgcuccuguagcggcuggcc

SEQ ID NO: 2588 - RNA, 23 nt, Artificial sequence
  Synthetic oligonucleotide
gcgcaccuccgccaccugcuccu

SEQ ID NO: 2589 - RNA, 23 nt, Artificial sequence
  Synthetic oligonucleotide
ccuucaccucguccaggcggucg

SEQ ID NO: 2590 - RNA, 23 nt, Artificial sequence
  Synthetic oligonucleotide
cuccuccauccgcgcgcgcagcc

SEQ ID NO: 2591 - RNA, 23 nt, Artificial sequence
  Synthetic oligonucleotide
gccgcucgccccaggccugggcc

SEQ ID NO: 2592 - RNA, 23 nt, Artificial sequence
  Synthetic oligonucleotide
ucgcggguccggcugcccaucuc

SEQ ID NO: 2593 - RNA, 23 nt, Artificial sequence
  Synthetic oligonucleotide
gccugcuccuccagcuuggcgcg

SEQ ID NO: 2594 - RNA, 23 nt, Artificial sequence
  Synthetic oligonucleotide
gcugcaugucuuccaccaggggc

SEQ ID NO: 2595 - RNA, 23 nt, Artificial sequence
  Synthetic oligonucleotide
caccagcccggcccacuggcgcu

SEQ ID NO: 2596 - RNA, 23 nt, Artificial sequence
  Synthetic oligonucleotide
ggcucgaaccagcucuugaggcg

SEQ ID NO: 2597 - RNA, 23 nt, Artificial sequence
  Synthetic oligonucleotide
ccugcaggcguaucugcugggcc

SEQ ID NO: 2598 - RNA, 23 nt, Artificial sequence
  Synthetic oligonucleotide
gcgggccuggaaggccucggccu

SEQ ID NO: 2599 - RNA, 23 nt, Artificial sequence
  Synthetic oligonucleotide
acggcagccugcaccuucuccac

SEQ ID NO: 2600 - RNA, 23 nt, Artificial sequence
  Synthetic oligonucleotide
cggcguucagugauugucgcugg

SEQ ID NO: 2601 - RNA, 23 nt, Artificial sequence
  Synthetic oligonucleotide
ggcguucagugauugucgcuggg

SEQ ID NO: 2602 - RNA, 23 nt, Artificial sequence
  Synthetic oligonucleotide
ucagugauugucgcugggcacag

SEQ ID NO: 2603 - RNA, 23 nt, Artificial sequence
  Synthetic oligonucleotide
caggggcggcgcuggugcccacg

SEQ ID NO: 2604 - RNA, 23 nt, Artificial sequence
  Synthetic oligonucleotide
ucggcguucagugauugucgcug

SEQ ID NO: 2605 - RNA, 23 nt, Artificial sequence
  Synthetic oligonucleotide
uucggcguucagugauugucgcu

SEQ ID NO: 2606 - RNA, 23 nt, Artificial sequence
  Synthetic oligonucleotide
aggcuucggcguucagugauugu

SEQ ID NO: 2607 - RNA, 23 nt, Artificial sequence
  Synthetic oligonucleotide
ggcuucggcguucagugauuguc

SEQ ID NO: 2608 - RNA, 23 nt, Artificial sequence
  Synthetic oligonucleotide
gcuucggcguucagugauugucg

SEQ ID NO: 2609 - RNA, 23 nt, Artificial sequence
  Synthetic oligonucleotide
cuucggcguucagugauugucgc

SEQ ID NO: 2610 - RNA, 23 nt, Artificial sequence
  Synthetic oligonucleotide
caggcuucggcguucagugauug

SEQ ID NO: 2611 - RNA, 23 nt, Artificial sequence
  Synthetic oligonucleotide
ugcaggcuucggcguucagugau

SEQ ID NO: 2612 - RNA, 23 nt, Artificial sequence
  Synthetic oligonucleotide
uggcugcaggcuucggcguucag

SEQ ID NO: 2613 - RNA, 23 nt, Artificial sequence
  Synthetic oligonucleotide
gcaggcuucggcguucagugauu

SEQ ID NO: 2614 - RNA, 23 nt, Artificial sequence
  Synthetic oligonucleotide
ggcugcaggcuucggcguucagu

SEQ ID NO: 2615 - RNA, 23 nt, Artificial sequence
  Synthetic oligonucleotide
gcugcaggcuucggcguucagug

SEQ ID NO: 2616 - RNA, 23 nt, Artificial sequence
  Synthetic oligonucleotide
cugcaggcuucggcguucaguga

SEQ ID NO: 2617 - RNA, 23 nt, Artificial sequence
  Synthetic oligonucleotide
auggcugcaggcuucggcguuca

SEQ ID NO: 2618 - RNA, 23 nt, Artificial sequence
  Synthetic oligonucleotide
ucgcauggcugcaggcuucggcg

SEQ ID NO: 2619 - RNA, 23 nt, Artificial sequence
  Synthetic oligonucleotide
cgcauggcugcaggcuucggcgu

SEQ ID NO: 2620 - RNA, 23 nt, Artificial sequence
  Synthetic oligonucleotide
gcauggcugcaggcuucggcguu

SEQ ID NO: 2621 - RNA, 23 nt, Artificial sequence
  Synthetic oligonucleotide
cauggcugcaggcuucggcguuc

SEQ ID NO: 2622 - RNA, 23 nt, Artificial sequence
  Synthetic oligonucleotide
gucgcauggcugcaggcuucggc

SEQ ID NO: 2623 - RNA, 23 nt, Artificial sequence
  Synthetic oligonucleotide
ggucgcauggcugcaggcuucgg

SEQ ID NO: 2624 - RNA, 23 nt, Artificial sequence
  Synthetic oligonucleotide
gggucgcauggcugcaggcuucg

SEQ ID NO: 2625 - RNA, 23 nt, Artificial sequence
  Synthetic oligonucleotide
ggggucgcauggcugcaggcuuc

SEQ ID NO: 2626 - RNA, 23 nt, Artificial sequence
  Synthetic oligonucleotide
cguggggucgcauggcugcaggc

SEQ ID NO: 2627 - RNA, 23 nt, Artificial sequence
  Synthetic oligonucleotide
guggggucgcauggcugcaggcu

SEQ ID NO: 2628 - RNA, 23 nt, Artificial sequence
  Synthetic oligonucleotide
uggggucgcauggcugcaggcuu

SEQ ID NO: 2629 - RNA, 23 nt, Artificial sequence
  Synthetic oligonucleotide
uggcguggggucgcauggcugca

SEQ ID NO: 2630 - RNA, 23 nt, Artificial sequence
  Synthetic oligonucleotide
ggguggcguggggucgcauggcu

SEQ ID NO: 2631 - RNA, 23 nt, Artificial sequence
  Synthetic oligonucleotide
gguggcguggggucgcauggcug

SEQ ID NO: 2632 - RNA, 23 nt, Artificial sequence
  Synthetic oligonucleotide
ggcguggggucgcauggcugcag

SEQ ID NO: 2633 - RNA, 23 nt, Artificial sequence
  Synthetic oligonucleotide
guggcguggggucgcauggcugc

SEQ ID NO: 2634 - RNA, 23 nt, Artificial sequence
  Synthetic oligonucleotide
gcguggggucgcauggcugcagg

SEQ ID NO: 2635 - RNA, 23 nt, Artificial sequence
  Synthetic oligonucleotide
cgggguggcguggggucgcaugg

SEQ ID NO: 2636 - RNA, 23 nt, Artificial sequence
  Synthetic oligonucleotide
ggcacgggguggcguggggucgc

SEQ ID NO: 2637 - RNA, 23 nt, Artificial sequence
  Synthetic oligonucleotide
gcacgggguggcguggggucgca

SEQ ID NO: 2638 - RNA, 23 nt, Artificial sequence
  Synthetic oligonucleotide
cacgggguggcguggggucgcau

SEQ ID NO: 2639 - RNA, 23 nt, Artificial sequence
  Synthetic oligonucleotide
gggguggcguggggucgcauggc

SEQ ID NO: 2640 - RNA, 23 nt, Artificial sequence
  Synthetic oligonucleotide
acgggguggcguggggucgcaug

SEQ ID NO: 2641 - RNA, 23 nt, Artificial sequence
  Synthetic oligonucleotide
gaggcacgggguggcgugggguc

SEQ ID NO: 2642 - RNA, 23 nt, Artificial sequence
  Synthetic oligonucleotide
gcaggaggcacgggguggcgugg

SEQ ID NO: 2643 - RNA, 23 nt, Artificial sequence
  Synthetic oligonucleotide
caggaggcacgggguggcguggg

SEQ ID NO: 2644 - RNA, 23 nt, Artificial sequence
  Synthetic oligonucleotide
ggaggcacgggguggcguggggu

SEQ ID NO: 2645 - RNA, 23 nt, Artificial sequence
  Synthetic oligonucleotide
aggaggcacgggguggcgugggg

SEQ ID NO: 2646 - RNA, 23 nt, Artificial sequence
  Synthetic oligonucleotide
aggcacgggguggcguggggucg

SEQ ID NO: 2647 - RNA, 23 nt, Artificial sequence
  Synthetic oligonucleotide
ggcaggaggcacgggguggcgug

SEQ ID NO: 2648 - RNA, 23 nt, Artificial sequence
  Synthetic oligonucleotide
gcggaggcaggaggcacggggug

SEQ ID NO: 2649 - RNA, 23 nt, Artificial sequence
  Synthetic oligonucleotide
ggaggcaggaggcacgggguggc

SEQ ID NO: 2650 - RNA, 23 nt, Artificial sequence
  Synthetic oligonucleotide
cggaggcaggaggcacggggugg

SEQ ID NO: 2651 - RNA, 23 nt, Artificial sequence
  Synthetic oligonucleotide
gaggcaggaggcacgggguggcg

SEQ ID NO: 2652 - RNA, 23 nt, Artificial sequence
  Synthetic oligonucleotide
aggcaggaggcacgggguggcgu

SEQ ID NO: 2653 - RNA, 23 nt, Artificial sequence
  Synthetic oligonucleotide
cgcggaggcaggaggcacggggu

SEQ ID NO: 2654 - RNA, 23 nt, Artificial sequence
  Synthetic oligonucleotide
ggcugcgcggaggcaggaggcac

SEQ ID NO: 2655 - RNA, 23 nt, Artificial sequence
  Synthetic oligonucleotide
gcugcgcggaggcaggaggcacg

SEQ ID NO: 2656 - RNA, 23 nt, Artificial sequence
  Synthetic oligonucleotide
ugcgcggaggcaggaggcacggg

SEQ ID NO: 2657 - RNA, 23 nt, Artificial sequence
  Synthetic oligonucleotide
gcgcggaggcaggaggcacgggg

SEQ ID NO: 2658 - RNA, 23 nt, Artificial sequence
  Synthetic oligonucleotide
cugcgcggaggcaggaggcacgg

SEQ ID NO: 2659 - RNA, 23 nt, Artificial sequence
  Synthetic oligonucleotide
caggcugcgcggaggcaggaggc

SEQ ID NO: 2660 - RNA, 23 nt, Artificial sequence
  Synthetic oligonucleotide
cgcugcaggcugcgcggaggcag

SEQ ID NO: 2661 - RNA, 23 nt, Artificial sequence
  Synthetic oligonucleotide
cugcaggcugcgcggaggcagga

SEQ ID NO: 2662 - RNA, 23 nt, Artificial sequence
  Synthetic oligonucleotide
ugcaggcugcgcggaggcaggag

SEQ ID NO: 2663 - RNA, 23 nt, Artificial sequence
  Synthetic oligonucleotide
aggcugcgcggaggcaggaggca

SEQ ID NO: 2664 - RNA, 23 nt, Artificial sequence
  Synthetic oligonucleotide
gcaggcugcgcggaggcaggagg

SEQ ID NO: 2665 - RNA, 23 nt, Artificial sequence
  Synthetic oligonucleotide
ccgcugcaggcugcgcggaggca

SEQ ID NO: 2666 - RNA, 23 nt, Artificial sequence
  Synthetic oligonucleotide
ucucccgcugcaggcugcgcgga

SEQ ID NO: 2667 - RNA, 23 nt, Artificial sequence
  Synthetic oligonucleotide
cucccgcugcaggcugcgcggag

SEQ ID NO: 2668 - RNA, 23 nt, Artificial sequence
  Synthetic oligonucleotide
cccgcugcaggcugcgcggaggc

SEQ ID NO: 2669 - RNA, 23 nt, Artificial sequence
  Synthetic oligonucleotide
ucccgcugcaggcugcgcggagg

SEQ ID NO: 2670 - RNA, 23 nt, Artificial sequence
  Synthetic oligonucleotide
gcugcaggcugcgcggaggcagg

SEQ ID NO: 2671 - RNA, 23 nt, Artificial sequence
  Synthetic oligonucleotide
gucucccgcugcaggcugcgcgg

SEQ ID NO: 2672 - RNA, 23 nt, Artificial sequence
  Synthetic oligonucleotide
ggucucccgcugcaggcugcgcg

SEQ ID NO: 2673 - RNA, 23 nt, Artificial sequence
  Synthetic oligonucleotide
acagggucucccgcugcaggcug

SEQ ID NO: 2674 - RNA, 23 nt, Artificial sequence
  Synthetic oligonucleotide
agggucucccgcugcaggcugcg

SEQ ID NO: 2675 - RNA, 23 nt, Artificial sequence
  Synthetic oligonucleotide
gggucucccgcugcaggcugcgc

SEQ ID NO: 2676 - RNA, 23 nt, Artificial sequence
  Synthetic oligonucleotide
cagggucucccgcugcaggcugc

SEQ ID NO: 2677 - RNA, 23 nt, Artificial sequence
  Synthetic oligonucleotide
gacagggucucccgcugcaggcu

SEQ ID NO: 2678 - RNA, 23 nt, Artificial sequence
  Synthetic oligonucleotide
gcggggacagggucucccgcugc

SEQ ID NO: 2679 - RNA, 23 nt, Artificial sequence
  Synthetic oligonucleotide
cggggacagggucucccgcugca

SEQ ID NO: 2680 - RNA, 23 nt, Artificial sequence
  Synthetic oligonucleotide
ggggacagggucucccgcugcag

SEQ ID NO: 2681 - RNA, 23 nt, Artificial sequence
  Synthetic oligonucleotide
ggacagggucucccgcugcaggc

SEQ ID NO: 2682 - RNA, 23 nt, Artificial sequence
  Synthetic oligonucleotide
gggacagggucucccgcugcagg

SEQ ID NO: 2683 - RNA, 23 nt, Artificial sequence
  Synthetic oligonucleotide
ggcggggacagggucucccgcug

SEQ ID NO: 2684 - RNA, 23 nt, Artificial sequence
  Synthetic oligonucleotide
gcuggggcggggacagggucucc

SEQ ID NO: 2685 - RNA, 23 nt, Artificial sequence
  Synthetic oligonucleotide
cuggggcggggacagggucuccc

SEQ ID NO: 2686 - RNA, 23 nt, Artificial sequence
  Synthetic oligonucleotide
uggggcggggacagggucucccg

SEQ ID NO: 2687 - RNA, 23 nt, Artificial sequence
  Synthetic oligonucleotide
gggcggggacagggucucccgcu

SEQ ID NO: 2688 - RNA, 23 nt, Artificial sequence
  Synthetic oligonucleotide
ggggcggggacagggucucccgc

SEQ ID NO: 2689 - RNA, 23 nt, Artificial sequence
  Synthetic oligonucleotide
ggacggcuggggcggggacaggg

SEQ ID NO: 2690 - RNA, 23 nt, Artificial sequence
  Synthetic oligonucleotide
ggcuggggcggggacagggucuc

SEQ ID NO: 2691 - RNA, 23 nt, Artificial sequence
  Synthetic oligonucleotide
gacggcuggggcggggacagggu

SEQ ID NO: 2692 - RNA, 23 nt, Artificial sequence
  Synthetic oligonucleotide
acggcuggggcggggacaggguc

SEQ ID NO: 2693 - RNA, 23 nt, Artificial sequence
  Synthetic oligonucleotide
cggcuggggcggggacagggucu

SEQ ID NO: 2694 - RNA, 23 nt, Artificial sequence
  Synthetic oligonucleotide
aggacggcuggggcggggacagg

SEQ ID NO: 2695 - RNA, 23 nt, Artificial sequence
  Synthetic oligonucleotide
gaggacggcuggggcggggacag

SEQ ID NO: 2696 - RNA, 23 nt, Artificial sequence
  Synthetic oligonucleotide
ccaggaggacggcuggggcgggg

SEQ ID NO: 2697 - RNA, 23 nt, Artificial sequence
  Synthetic oligonucleotide
cccaggaggacggcuggggcggg

SEQ ID NO: 2698 - RNA, 23 nt, Artificial sequence
  Synthetic oligonucleotide
caggaggacggcuggggcgggga

SEQ ID NO: 2699 - RNA, 23 nt, Artificial sequence
  Synthetic oligonucleotide
aggaggacggcuggggcggggac

SEQ ID NO: 2700 - RNA, 23 nt, Artificial sequence
  Synthetic oligonucleotide
ggaggacggcuggggcggggaca

SEQ ID NO: 2701 - RNA, 23 nt, Artificial sequence
  Synthetic oligonucleotide
ccccaggaggacggcuggggcgg

SEQ ID NO: 2702 - RNA, 23 nt, Artificial sequence
  Synthetic oligonucleotide
guccaccccaggaggacggcugg

SEQ ID NO: 2703 - RNA, 23 nt, Artificial sequence
  Synthetic oligonucleotide
uccaccccaggaggacggcuggg

SEQ ID NO: 2704 - RNA, 23 nt, Artificial sequence
  Synthetic oligonucleotide
ccaccccaggaggacggcugggg

SEQ ID NO: 2705 - RNA, 23 nt, Artificial sequence
  Synthetic oligonucleotide
caccccaggaggacggcuggggc

SEQ ID NO: 2706 - RNA, 23 nt, Artificial sequence
  Synthetic oligonucleotide
accccaggaggacggcuggggcg

SEQ ID NO: 2707 - RNA, 23 nt, Artificial sequence
  Synthetic oligonucleotide
gguccaccccaggaggacggcug

SEQ ID NO: 2708 - RNA, 23 nt, Artificial sequence
  Synthetic oligonucleotide
uaggguccaccccaggaggacgg

SEQ ID NO: 2709 - RNA, 23 nt, Artificial sequence
  Synthetic oligonucleotide
ggguccaccccaggaggacggcu

SEQ ID NO: 2710 - RNA, 23 nt, Artificial sequence
  Synthetic oligonucleotide
aggguccaccccaggaggacggc

SEQ ID NO: 2711 - RNA, 23 nt, Artificial sequence
  Synthetic oligonucleotide
cuaggguccaccccaggaggacg

SEQ ID NO: 2712 - RNA, 23 nt, Artificial sequence
  Synthetic oligonucleotide
acuaggguccaccccaggaggac

SEQ ID NO: 2713 - RNA, 23 nt, Artificial sequence
  Synthetic oligonucleotide
aacuaggguccaccccaggagga

SEQ ID NO: 2714 - RNA, 23 nt, Artificial sequence
  Synthetic oligonucleotide
auuaaacuaggguccaccccagg

SEQ ID NO: 2715 - RNA, 23 nt, Artificial sequence
  Synthetic oligonucleotide
uuaaacuaggguccaccccagga

SEQ ID NO: 2716 - RNA, 23 nt, Artificial sequence
  Synthetic oligonucleotide
uauuaaacuaggguccaccccag

SEQ ID NO: 2717 - RNA, 23 nt, Artificial sequence
  Synthetic oligonucleotide
aaacuaggguccaccccaggagg

SEQ ID NO: 2718 - RNA, 23 nt, Artificial sequence
  Synthetic oligonucleotide
uaaacuaggguccaccccaggag

SEQ ID NO: 2719 - RNA, 23 nt, Artificial sequence
  Synthetic oligonucleotide
cuuuauuaaacuaggguccaccc

SEQ ID NO: 2720 - RNA, 23 nt, Artificial sequence
  Synthetic oligonucleotide
aaucuuuauuaaacuagggucca

SEQ ID NO: 2721 - RNA, 23 nt, Artificial sequence
  Synthetic oligonucleotide
aucuuuauuaaacuaggguccac

SEQ ID NO: 2722 - RNA, 23 nt, Artificial sequence
  Synthetic oligonucleotide
ucuuuauuaaacuaggguccacc

SEQ ID NO: 2723 - RNA, 23 nt, Artificial sequence
  Synthetic oligonucleotide
uuuauuaaacuaggguccacccc

SEQ ID NO: 2724 - RNA, 23 nt, Artificial sequence
  Synthetic oligonucleotide
uuauuaaacuaggguccacccca

SEQ ID NO: 2725 - RNA, 23 nt, Artificial sequence
  Synthetic oligonucleotide
gaaucuuuauuaaacuagggucc

SEQ ID NO: 2726 - RNA, 23 nt, Artificial sequence
  Synthetic oligonucleotide
uggugaaucuuuauuaaacuagg

SEQ ID NO: 2727 - RNA, 23 nt, Artificial sequence
  Synthetic oligonucleotide
ggugaaucuuuauuaaacuaggg

SEQ ID NO: 2728 - RNA, 23 nt, Artificial sequence
  Synthetic oligonucleotide
gugaaucuuuauuaaacuagggu

SEQ ID NO: 2729 - RNA, 23 nt, Artificial sequence
  Synthetic oligonucleotide
ugaaucuuuauuaaacuaggguc

SEQ ID NO: 2730 - RNA, 23 nt, Artificial sequence
  Synthetic oligonucleotide
uuggugaaucuuuauuaaacuag

SEQ ID NO: 2731 - RNA, 23 nt, Artificial sequence
  Synthetic oligonucleotide
cuuggugaaucuuuauuaaacua

SEQ ID NO: 2732 - RNA, 23 nt, Artificial sequence
  Synthetic oligonucleotide
ugaaacuuggugaaucuuuauua

SEQ ID NO: 2733 - RNA, 23 nt, Artificial sequence
  Synthetic oligonucleotide
gaaacuuggugaaucuuuauuaa

SEQ ID NO: 2734 - RNA, 23 nt, Artificial sequence
  Synthetic oligonucleotide
aaacuuggugaaucuuuauuaaa

SEQ ID NO: 2735 - RNA, 23 nt, Artificial sequence
  Synthetic oligonucleotide
aacuuggugaaucuuuauuaaac

SEQ ID NO: 2736 - RNA, 23 nt, Artificial sequence
  Synthetic oligonucleotide
acuuggugaaucuuuauuaaacu

SEQ ID NO: 2737 - RNA, 23 nt, Artificial sequence
  Synthetic oligonucleotide
cgugaaacuuggugaaucuuuau

SEQ ID NO: 2738 - RNA, 23 nt, Artificial sequence
  Synthetic oligonucleotide
gcgugaaacuuggugaaucuuua

SEQ ID NO: 2739 - RNA, 23 nt, Artificial sequence
  Synthetic oligonucleotide
ugcgugaaacuuggugaaucuuu

SEQ ID NO: 2740 - RNA, 23 nt, Artificial sequence
  Synthetic oligonucleotide
gugaaacuuggugaaucuuuauu

SEQ ID NO: 2741 - RNA, 23 nt, Artificial sequence
  Synthetic oligonucleotide
gccugugauuggccagucggcuc

SEQ ID NO: 2742 - RNA, 23 nt, Artificial sequence
  Synthetic oligonucleotide
ggcggccgcgcacguccuccaug

SEQ ID NO: 2743 - RNA, 21 nt, Artificial sequence
  Synthetic oligonucleotide
acucagccccagcggagguga

SEQ ID NO: 2744 - RNA, 21 nt, Artificial sequence
  Synthetic oligonucleotide
gggcugcguugcuggucacau

SEQ ID NO: 2745 - RNA, 21 nt, Artificial sequence
  Synthetic oligonucleotide
caggaagaugaagguucugug

SEQ ID NO: 2746 - RNA, 21 nt, Artificial sequence
  Synthetic oligonucleotide
aaggacguccuuccccaggag

SEQ ID NO: 2747 - RNA, 21 nt, Artificial sequence
  Synthetic oligonucleotide
uuccuggcaggaugccaggcc

SEQ ID NO: 2748 - RNA, 21 nt, Artificial sequence
  Synthetic oligonucleotide
caagguggagcaagcggugga

SEQ ID NO: 2749 - RNA, 21 nt, Artificial sequence
  Synthetic oligonucleotide
ugggauuaccugcgcugggug

SEQ ID NO: 2750 - RNA, 21 nt, Artificial sequence
  Synthetic oligonucleotide
aacuggcacugggucgcuuuu

SEQ ID NO: 2751 - RNA, 21 nt, Artificial sequence
  Synthetic oligonucleotide
gcagagcggccagcgcuggga

SEQ ID NO: 2752 - RNA, 21 nt, Artificial sequence
  Synthetic oligonucleotide
cugcgccagcagaccgagugg

SEQ ID NO: 2753 - RNA, 21 nt, Artificial sequence
  Synthetic oligonucleotide
agacagagccggagcccgagc

SEQ ID NO: 2754 - RNA, 21 nt, Artificial sequence
  Synthetic oligonucleotide
gcagacacugucugagcaggu

SEQ ID NO: 2755 - RNA, 21 nt, Artificial sequence
  Synthetic oligonucleotide
ccaugaaggaguugaaggccu

SEQ ID NO: 2756 - RNA, 21 nt, Artificial sequence
  Synthetic oligonucleotide
gagggcgcugauggacgagac

SEQ ID NO: 2757 - RNA, 21 nt, Artificial sequence
  Synthetic oligonucleotide
ugcaggaggagcugcucagcu

SEQ ID NO: 2758 - RNA, 21 nt, Artificial sequence
  Synthetic oligonucleotide
ucccaggucacccaggaacug

SEQ ID NO: 2759 - RNA, 21 nt, Artificial sequence
  Synthetic oligonucleotide
uacaaaucggaacuggaggaa

SEQ ID NO: 2760 - RNA, 21 nt, Artificial sequence
  Synthetic oligonucleotide
acaacugaccccgguggcgga

SEQ ID NO: 2761 - RNA, 21 nt, Artificial sequence
  Synthetic oligonucleotide
cgccuggugcaguaccgcggc

SEQ ID NO: 2762 - RNA, 21 nt, Artificial sequence
  Synthetic oligonucleotide
acauggaggacgugugcggcc

SEQ ID NO: 2763 - RNA, 21 nt, Artificial sequence
  Synthetic oligonucleotide
gcaggcccggcugggcgcgga

SEQ ID NO: 2764 - RNA, 21 nt, Artificial sequence
  Synthetic oligonucleotide
uccaaggagcugcaggcggcg

SEQ ID NO: 2765 - RNA, 21 nt, Artificial sequence
  Synthetic oligonucleotide
aggagacgcgggcacggcugu

SEQ ID NO: 2766 - RNA, 21 nt, Artificial sequence
  Synthetic oligonucleotide
cgaggugcaggccaugcucgg

SEQ ID NO: 2767 - RNA, 21 nt, Artificial sequence
  Synthetic oligonucleotide
gaccugcagaagcgccuggca

SEQ ID NO: 2768 - RNA, 21 nt, Artificial sequence
  Synthetic oligonucleotide
ggcuccuccgcgaugccgaug

SEQ ID NO: 2769 - RNA, 21 nt, Artificial sequence
  Synthetic oligonucleotide
ccugcgcaagcugcguaagcg

SEQ ID NO: 2770 - RNA, 21 nt, Artificial sequence
  Synthetic oligonucleotide
cgggugcgccucgccucccac

SEQ ID NO: 2771 - RNA, 21 nt, Artificial sequence
  Synthetic oligonucleotide
gccagagcaccgaggagcugc

SEQ ID NO: 2772 - RNA, 21 nt, Artificial sequence
  Synthetic oligonucleotide
aguguaccaggccggggcccg

SEQ ID NO: 2773 - RNA, 21 nt, Artificial sequence
  Synthetic oligonucleotide
agggccgcgugcgggccgcca

SEQ ID NO: 2774 - RNA, 21 nt, Artificial sequence
  Synthetic oligonucleotide
ccuggggccccugguggaaca

SEQ ID NO: 2775 - RNA, 21 nt, Artificial sequence
  Synthetic oligonucleotide
cucagcgccauccgcgagcgc

SEQ ID NO: 2776 - RNA, 21 nt, Artificial sequence
  Synthetic oligonucleotide
gcgagggcgccgagcgcggcc

SEQ ID NO: 2777 - RNA, 21 nt, Artificial sequence
  Synthetic oligonucleotide
acugugggcucccuggccggc

SEQ ID NO: 2778 - RNA, 21 nt, Artificial sequence
  Synthetic oligonucleotide
ccagccgcuacaggagcgggc

SEQ ID NO: 2779 - RNA, 21 nt, Artificial sequence
  Synthetic oligonucleotide
gagcagguggcggaggugcgc

SEQ ID NO: 2780 - RNA, 21 nt, Artificial sequence
  Synthetic oligonucleotide
accgccuggacgaggugaagg

SEQ ID NO: 2781 - RNA, 21 nt, Artificial sequence
  Synthetic oligonucleotide
cugcgcgcgcggauggaggag

SEQ ID NO: 2782 - RNA, 21 nt, Artificial sequence
  Synthetic oligonucleotide
cccaggccuggggcgagcggc

SEQ ID NO: 2783 - RNA, 21 nt, Artificial sequence
  Synthetic oligonucleotide
gaugggcagccggacccgcga

SEQ ID NO: 2784 - RNA, 21 nt, Artificial sequence
  Synthetic oligonucleotide
cgccaagcuggaggagcaggc

SEQ ID NO: 2785 - RNA, 21 nt, Artificial sequence
  Synthetic oligonucleotide
cccugguggaagacaugcagc

SEQ ID NO: 2786 - RNA, 21 nt, Artificial sequence
  Synthetic oligonucleotide
cgccagugggccgggcuggug

SEQ ID NO: 2787 - RNA, 21 nt, Artificial sequence
  Synthetic oligonucleotide
ccucaagagcugguucgagcc

SEQ ID NO: 2788 - RNA, 21 nt, Artificial sequence
  Synthetic oligonucleotide
cccagcagauacgccugcagg

SEQ ID NO: 2789 - RNA, 21 nt, Artificial sequence
  Synthetic oligonucleotide
gccgaggccuuccaggcccgc

SEQ ID NO: 2790 - RNA, 21 nt, Artificial sequence
  Synthetic oligonucleotide
ggagaaggugcaggcugccgu

SEQ ID NO: 2791 - RNA, 21 nt, Artificial sequence
  Synthetic oligonucleotide
agcgacaaucacugaacgccg

SEQ ID NO: 2792 - RNA, 21 nt, Artificial sequence
  Synthetic oligonucleotide
cagcgacaaucacugaacgcc

SEQ ID NO: 2793 - RNA, 21 nt, Artificial sequence
  Synthetic oligonucleotide
gugcccagcgacaaucacuga

SEQ ID NO: 2794 - RNA, 21 nt, Artificial sequence
  Synthetic oligonucleotide
ugggcaccagcgccgccccug

SEQ ID NO: 2795 - RNA, 21 nt, Artificial sequence
  Synthetic oligonucleotide
gcgacaaucacugaacgccga

SEQ ID NO: 2796 - RNA, 21 nt, Artificial sequence
  Synthetic oligonucleotide
cgacaaucacugaacgccgaa

SEQ ID NO: 2797 - RNA, 21 nt, Artificial sequence
  Synthetic oligonucleotide
aaucacugaacgccgaagccu

SEQ ID NO: 2798 - RNA, 21 nt, Artificial sequence
  Synthetic oligonucleotide
caaucacugaacgccgaagcc

SEQ ID NO: 2799 - RNA, 21 nt, Artificial sequence
  Synthetic oligonucleotide
acaaucacugaacgccgaagc

SEQ ID NO: 2800 - RNA, 21 nt, Artificial sequence
  Synthetic oligonucleotide
gacaaucacugaacgccgaag

SEQ ID NO: 2801 - RNA, 21 nt, Artificial sequence
  Synthetic oligonucleotide
aucacugaacgccgaagccug

SEQ ID NO: 2802 - RNA, 21 nt, Artificial sequence
  Synthetic oligonucleotide
cacugaacgccgaagccugca

SEQ ID NO: 2803 - RNA, 21 nt, Artificial sequence
  Synthetic oligonucleotide
gaacgccgaagccugcagcca

SEQ ID NO: 2804 - RNA, 21 nt, Artificial sequence
  Synthetic oligonucleotide
ucacugaacgccgaagccugc

SEQ ID NO: 2805 - RNA, 21 nt, Artificial sequence
  Synthetic oligonucleotide
ugaacgccgaagccugcagcc

SEQ ID NO: 2806 - RNA, 21 nt, Artificial sequence
  Synthetic oligonucleotide
cugaacgccgaagccugcagc

SEQ ID NO: 2807 - RNA, 21 nt, Artificial sequence
  Synthetic oligonucleotide
acugaacgccgaagccugcag

SEQ ID NO: 2808 - RNA, 21 nt, Artificial sequence
  Synthetic oligonucleotide
aacgccgaagccugcagccau

SEQ ID NO: 2809 - RNA, 21 nt, Artificial sequence
  Synthetic oligonucleotide
ccgaagccugcagccaugcga

SEQ ID NO: 2810 - RNA, 21 nt, Artificial sequence
  Synthetic oligonucleotide
gccgaagccugcagccaugcg

SEQ ID NO: 2811 - RNA, 21 nt, Artificial sequence
  Synthetic oligonucleotide
cgccgaagccugcagccaugc

SEQ ID NO: 2812 - RNA, 21 nt, Artificial sequence
  Synthetic oligonucleotide
acgccgaagccugcagccaug

SEQ ID NO: 2813 - RNA, 21 nt, Artificial sequence
  Synthetic oligonucleotide
cgaagccugcagccaugcgac

SEQ ID NO: 2814 - RNA, 21 nt, Artificial sequence
  Synthetic oligonucleotide
gaagccugcagccaugcgacc

SEQ ID NO: 2815 - RNA, 21 nt, Artificial sequence
  Synthetic oligonucleotide
aagccugcagccaugcgaccc

SEQ ID NO: 2816 - RNA, 21 nt, Artificial sequence
  Synthetic oligonucleotide
agccugcagccaugcgacccc

SEQ ID NO: 2817 - RNA, 21 nt, Artificial sequence
  Synthetic oligonucleotide
cugcagccaugcgaccccacg

SEQ ID NO: 2818 - RNA, 21 nt, Artificial sequence
  Synthetic oligonucleotide
ccugcagccaugcgaccccac

SEQ ID NO: 2819 - RNA, 21 nt, Artificial sequence
  Synthetic oligonucleotide
gccugcagccaugcgacccca

SEQ ID NO: 2820 - RNA, 21 nt, Artificial sequence
  Synthetic oligonucleotide
cagccaugcgaccccacgcca

SEQ ID NO: 2821 - RNA, 21 nt, Artificial sequence
  Synthetic oligonucleotide
ccaugcgaccccacgccaccc

SEQ ID NO: 2822 - RNA, 21 nt, Artificial sequence
  Synthetic oligonucleotide
gccaugcgaccccacgccacc

SEQ ID NO: 2823 - RNA, 21 nt, Artificial sequence
  Synthetic oligonucleotide
gcagccaugcgaccccacgcc

SEQ ID NO: 2824 - RNA, 21 nt, Artificial sequence
  Synthetic oligonucleotide
agccaugcgaccccacgccac

SEQ ID NO: 2825 - RNA, 21 nt, Artificial sequence
  Synthetic oligonucleotide
ugcagccaugcgaccccacgc

SEQ ID NO: 2826 - RNA, 21 nt, Artificial sequence
  Synthetic oligonucleotide
augcgaccccacgccaccccg

SEQ ID NO: 2827 - RNA, 21 nt, Artificial sequence
  Synthetic oligonucleotide
gaccccacgccaccccgugcc

SEQ ID NO: 2828 - RNA, 21 nt, Artificial sequence
  Synthetic oligonucleotide
cgaccccacgccaccccgugc

SEQ ID NO: 2829 - RNA, 21 nt, Artificial sequence
  Synthetic oligonucleotide
gcgaccccacgccaccccgug

SEQ ID NO: 2830 - RNA, 21 nt, Artificial sequence
  Synthetic oligonucleotide
caugcgaccccacgccacccc

SEQ ID NO: 2831 - RNA, 21 nt, Artificial sequence
  Synthetic oligonucleotide
ugcgaccccacgccaccccgu

SEQ ID NO: 2832 - RNA, 21 nt, Artificial sequence
  Synthetic oligonucleotide
ccccacgccaccccgugccuc

SEQ ID NO: 2833 - RNA, 21 nt, Artificial sequence
  Synthetic oligonucleotide
acgccaccccgugccuccugc

SEQ ID NO: 2834 - RNA, 21 nt, Artificial sequence
  Synthetic oligonucleotide
cacgccaccccgugccuccug

SEQ ID NO: 2835 - RNA, 21 nt, Artificial sequence
  Synthetic oligonucleotide
cccacgccaccccgugccucc

SEQ ID NO: 2836 - RNA, 21 nt, Artificial sequence
  Synthetic oligonucleotide
ccacgccaccccgugccuccu

SEQ ID NO: 2837 - RNA, 21 nt, Artificial sequence
  Synthetic oligonucleotide
accccacgccaccccgugccu

SEQ ID NO: 2838 - RNA, 21 nt, Artificial sequence
  Synthetic oligonucleotide
cgccaccccgugccuccugcc

SEQ ID NO: 2839 - RNA, 21 nt, Artificial sequence
  Synthetic oligonucleotide
ccccgugccuccugccuccgc

SEQ ID NO: 2840 - RNA, 21 nt, Artificial sequence
  Synthetic oligonucleotide
caccccgugccuccugccucc

SEQ ID NO: 2841 - RNA, 21 nt, Artificial sequence
  Synthetic oligonucleotide
accccgugccuccugccuccg

SEQ ID NO: 2842 - RNA, 21 nt, Artificial sequence
  Synthetic oligonucleotide
ccaccccgugccuccugccuc

SEQ ID NO: 2843 - RNA, 21 nt, Artificial sequence
  Synthetic oligonucleotide
gccaccccgugccuccugccu

SEQ ID NO: 2844 - RNA, 21 nt, Artificial sequence
  Synthetic oligonucleotide
cccgugccuccugccuccgcg

SEQ ID NO: 2845 - RNA, 21 nt, Artificial sequence
  Synthetic oligonucleotide
gccuccugccuccgcgcagcc

SEQ ID NO: 2846 - RNA, 21 nt, Artificial sequence
  Synthetic oligonucleotide
ugccuccugccuccgcgcagc

SEQ ID NO: 2847 - RNA, 21 nt, Artificial sequence
  Synthetic oligonucleotide
cgugccuccugccuccgcgca

SEQ ID NO: 2848 - RNA, 21 nt, Artificial sequence
  Synthetic oligonucleotide
ccgugccuccugccuccgcgc

SEQ ID NO: 2849 - RNA, 21 nt, Artificial sequence
  Synthetic oligonucleotide
gugccuccugccuccgcgcag

SEQ ID NO: 2850 - RNA, 21 nt, Artificial sequence
  Synthetic oligonucleotide
cuccugccuccgcgcagccug

SEQ ID NO: 2851 - RNA, 21 nt, Artificial sequence
  Synthetic oligonucleotide
gccuccgcgcagccugcagcg

SEQ ID NO: 2852 - RNA, 21 nt, Artificial sequence
  Synthetic oligonucleotide
cugccuccgcgcagccugcag

SEQ ID NO: 2853 - RNA, 21 nt, Artificial sequence
  Synthetic oligonucleotide
ccugccuccgcgcagccugca

SEQ ID NO: 2854 - RNA, 21 nt, Artificial sequence
  Synthetic oligonucleotide
ccuccugccuccgcgcagccu

SEQ ID NO: 2855 - RNA, 21 nt, Artificial sequence
  Synthetic oligonucleotide
uccugccuccgcgcagccugc

SEQ ID NO: 2856 - RNA, 21 nt, Artificial sequence
  Synthetic oligonucleotide
ccuccgcgcagccugcagcgg

SEQ ID NO: 2857 - RNA, 21 nt, Artificial sequence
  Synthetic oligonucleotide
cgcgcagccugcagcgggaga

SEQ ID NO: 2858 - RNA, 21 nt, Artificial sequence
  Synthetic oligonucleotide
ccgcgcagccugcagcgggag

SEQ ID NO: 2859 - RNA, 21 nt, Artificial sequence
  Synthetic oligonucleotide
cuccgcgcagccugcagcggg

SEQ ID NO: 2860 - RNA, 21 nt, Artificial sequence
  Synthetic oligonucleotide
uccgcgcagccugcagcggga

SEQ ID NO: 2861 - RNA, 21 nt, Artificial sequence
  Synthetic oligonucleotide
ugccuccgcgcagccugcagc

SEQ ID NO: 2862 - RNA, 21 nt, Artificial sequence
  Synthetic oligonucleotide
gcgcagccugcagcgggagac

SEQ ID NO: 2863 - RNA, 21 nt, Artificial sequence
  Synthetic oligonucleotide
cgcagccugcagcgggagacc

SEQ ID NO: 2864 - RNA, 21 nt, Artificial sequence
  Synthetic oligonucleotide
gccugcagcgggagacccugu

SEQ ID NO: 2865 - RNA, 21 nt, Artificial sequence
  Synthetic oligonucleotide
cagccugcagcgggagacccu

SEQ ID NO: 2866 - RNA, 21 nt, Artificial sequence
  Synthetic oligonucleotide
gcagccugcagcgggagaccc

SEQ ID NO: 2867 - RNA, 21 nt, Artificial sequence
  Synthetic oligonucleotide
agccugcagcgggagacccug

SEQ ID NO: 2868 - RNA, 21 nt, Artificial sequence
  Synthetic oligonucleotide
ccugcagcgggagacccuguc

SEQ ID NO: 2869 - RNA, 21 nt, Artificial sequence
  Synthetic oligonucleotide
agcgggagacccuguccccgc

SEQ ID NO: 2870 - RNA, 21 nt, Artificial sequence
  Synthetic oligonucleotide
cagcgggagacccuguccccg

SEQ ID NO: 2871 - RNA, 21 nt, Artificial sequence
  Synthetic oligonucleotide
gcagcgggagacccugucccc

SEQ ID NO: 2872 - RNA, 21 nt, Artificial sequence
  Synthetic oligonucleotide
cugcagcgggagacccugucc

SEQ ID NO: 2873 - RNA, 21 nt, Artificial sequence
  Synthetic oligonucleotide
ugcagcgggagacccuguccc

SEQ ID NO: 2874 - RNA, 21 nt, Artificial sequence
  Synthetic oligonucleotide
gcgggagacccuguccccgcc

SEQ ID NO: 2875 - RNA, 21 nt, Artificial sequence
  Synthetic oligonucleotide
agacccuguccccgccccagc

SEQ ID NO: 2876 - RNA, 21 nt, Artificial sequence
  Synthetic oligonucleotide
gagacccuguccccgccccag

SEQ ID NO: 2877 - RNA, 21 nt, Artificial sequence
  Synthetic oligonucleotide
ggagacccuguccccgcccca

SEQ ID NO: 2878 - RNA, 21 nt, Artificial sequence
  Synthetic oligonucleotide
cgggagacccuguccccgccc

SEQ ID NO: 2879 - RNA, 21 nt, Artificial sequence
  Synthetic oligonucleotide
gggagacccuguccccgcccc

SEQ ID NO: 2880 - RNA, 21 nt, Artificial sequence
  Synthetic oligonucleotide
cuguccccgccccagccgucc

SEQ ID NO: 2881 - RNA, 21 nt, Artificial sequence
  Synthetic oligonucleotide
gacccuguccccgccccagcc

SEQ ID NO: 2882 - RNA, 21 nt, Artificial sequence
  Synthetic oligonucleotide
ccuguccccgccccagccguc

SEQ ID NO: 2883 - RNA, 21 nt, Artificial sequence
  Synthetic oligonucleotide
cccuguccccgccccagccgu

SEQ ID NO: 2884 - RNA, 21 nt, Artificial sequence
  Synthetic oligonucleotide
acccuguccccgccccagccg

SEQ ID NO: 2885 - RNA, 21 nt, Artificial sequence
  Synthetic oligonucleotide
uguccccgccccagccguccu

SEQ ID NO: 2886 - RNA, 21 nt, Artificial sequence
  Synthetic oligonucleotide
guccccgccccagccguccuc

SEQ ID NO: 2887 - RNA, 21 nt, Artificial sequence
  Synthetic oligonucleotide
ccgccccagccguccuccugg

SEQ ID NO: 2888 - RNA, 21 nt, Artificial sequence
  Synthetic oligonucleotide
cgccccagccguccuccuggg

SEQ ID NO: 2889 - RNA, 21 nt, Artificial sequence
  Synthetic oligonucleotide
cccgccccagccguccuccug

SEQ ID NO: 2890 - RNA, 21 nt, Artificial sequence
  Synthetic oligonucleotide
ccccgccccagccguccuccu

SEQ ID NO: 2891 - RNA, 21 nt, Artificial sequence
  Synthetic oligonucleotide
uccccgccccagccguccucc

SEQ ID NO: 2892 - RNA, 21 nt, Artificial sequence
  Synthetic oligonucleotide
gccccagccguccuccugggg

SEQ ID NO: 2893 - RNA, 21 nt, Artificial sequence
  Synthetic oligonucleotide
agccguccuccugggguggac

SEQ ID NO: 2894 - RNA, 21 nt, Artificial sequence
  Synthetic oligonucleotide
cagccguccuccuggggugga

SEQ ID NO: 2895 - RNA, 21 nt, Artificial sequence
  Synthetic oligonucleotide
ccagccguccuccuggggugg

SEQ ID NO: 2896 - RNA, 21 nt, Artificial sequence
  Synthetic oligonucleotide
cccagccguccuccuggggug

SEQ ID NO: 2897 - RNA, 21 nt, Artificial sequence
  Synthetic oligonucleotide
ccccagccguccuccuggggu

SEQ ID NO: 2898 - RNA, 21 nt, Artificial sequence
  Synthetic oligonucleotide
gccguccuccugggguggacc

SEQ ID NO: 2899 - RNA, 21 nt, Artificial sequence
  Synthetic oligonucleotide
guccuccugggguggacccua

SEQ ID NO: 2900 - RNA, 21 nt, Artificial sequence
  Synthetic oligonucleotide
ccguccuccugggguggaccc

SEQ ID NO: 2901 - RNA, 21 nt, Artificial sequence
  Synthetic oligonucleotide
cguccuccugggguggacccu

SEQ ID NO: 2902 - RNA, 21 nt, Artificial sequence
  Synthetic oligonucleotide
uccuccugggguggacccuag

SEQ ID NO: 2903 - RNA, 21 nt, Artificial sequence
  Synthetic oligonucleotide
ccuccugggguggacccuagu

SEQ ID NO: 2904 - RNA, 21 nt, Artificial sequence
  Synthetic oligonucleotide
cuccugggguggacccuaguu

SEQ ID NO: 2905 - RNA, 21 nt, Artificial sequence
  Synthetic oligonucleotide
ugggguggacccuaguuuaau

SEQ ID NO: 2906 - RNA, 21 nt, Artificial sequence
  Synthetic oligonucleotide
cugggguggacccuaguuuaa

SEQ ID NO: 2907 - RNA, 21 nt, Artificial sequence
  Synthetic oligonucleotide
gggguggacccuaguuuaaua

SEQ ID NO: 2908 - RNA, 21 nt, Artificial sequence
  Synthetic oligonucleotide
uccugggguggacccuaguuu

SEQ ID NO: 2909 - RNA, 21 nt, Artificial sequence
  Synthetic oligonucleotide
ccugggguggacccuaguuua

SEQ ID NO: 2910 - RNA, 21 nt, Artificial sequence
  Synthetic oligonucleotide
guggacccuaguuuaauaaag

SEQ ID NO: 2911 - RNA, 21 nt, Artificial sequence
  Synthetic oligonucleotide
gacccuaguuuaauaaagauu

SEQ ID NO: 2912 - RNA, 21 nt, Artificial sequence
  Synthetic oligonucleotide
ggacccuaguuuaauaaagau

SEQ ID NO: 2913 - RNA, 21 nt, Artificial sequence
  Synthetic oligonucleotide
uggacccuaguuuaauaaaga

SEQ ID NO: 2914 - RNA, 21 nt, Artificial sequence
  Synthetic oligonucleotide
gguggacccuaguuuaauaaa

SEQ ID NO: 2915 - RNA, 21 nt, Artificial sequence
  Synthetic oligonucleotide
ggguggacccuaguuuaauaa

SEQ ID NO: 2916 - RNA, 21 nt, Artificial sequence
  Synthetic oligonucleotide
acccuaguuuaauaaagauuc

SEQ ID NO: 2917 - RNA, 21 nt, Artificial sequence
  Synthetic oligonucleotide
uaguuuaauaaagauucacca

SEQ ID NO: 2918 - RNA, 21 nt, Artificial sequence
  Synthetic oligonucleotide
cuaguuuaauaaagauucacc

SEQ ID NO: 2919 - RNA, 21 nt, Artificial sequence
  Synthetic oligonucleotide
ccuaguuuaauaaagauucac

SEQ ID NO: 2920 - RNA, 21 nt, Artificial sequence
  Synthetic oligonucleotide
cccuaguuuaauaaagauuca

SEQ ID NO: 2921 - RNA, 21 nt, Artificial sequence
  Synthetic oligonucleotide
aguuuaauaaagauucaccaa

SEQ ID NO: 2922 - RNA, 21 nt, Artificial sequence
  Synthetic oligonucleotide
guuuaauaaagauucaccaag

SEQ ID NO: 2923 - RNA, 21 nt, Artificial sequence
  Synthetic oligonucleotide
auaaagauucaccaaguuuca

SEQ ID NO: 2924 - RNA, 21 nt, Artificial sequence
  Synthetic oligonucleotide
aauaaagauucaccaaguuuc

SEQ ID NO: 2925 - RNA, 21 nt, Artificial sequence
  Synthetic oligonucleotide
uaauaaagauucaccaaguuu

SEQ ID NO: 2926 - RNA, 21 nt, Artificial sequence
  Synthetic oligonucleotide
uuaauaaagauucaccaaguu

SEQ ID NO: 2927 - RNA, 21 nt, Artificial sequence
  Synthetic oligonucleotide
uuuaauaaagauucaccaagu

SEQ ID NO: 2928 - RNA, 21 nt, Artificial sequence
  Synthetic oligonucleotide
aaagauucaccaaguuucacg

SEQ ID NO: 2929 - RNA, 21 nt, Artificial sequence
  Synthetic oligonucleotide
aagauucaccaaguuucacgc

SEQ ID NO: 2930 - RNA, 21 nt, Artificial sequence
  Synthetic oligonucleotide
agauucaccaaguuucacgca

SEQ ID NO: 2931 - RNA, 21 nt, Artificial sequence
  Synthetic oligonucleotide
uaaagauucaccaaguuucac

SEQ ID NO: 2932 - RNA, 21 nt, Artificial sequence
  Synthetic oligonucleotide
gccgacuggccaaucacaggc

SEQ ID NO: 2933 - RNA, 21 nt, Artificial sequence
  Synthetic oligonucleotide
uggaggacgugcgcggccgcc

SEQ ID NO: 2934 - DNA, 20 bp, Artificial sequence
  Synthetic oligonucleotide
gctccaccttggcctggcat

SEQ ID NO: 2935 - DNA, 23 bp, Artificial sequence
  Synthetic oligonucleotide
  misc_feature (2)..(23): bases at these positions are RNA
taucuuuauuaaacuagggucca

SEQ ID NO: 2936 - DNA, 23 bp, Artificial sequence
  Synthetic oligonucleotide
  misc_feature (2)..(23): basese at these positions are RNA
taacuuggugaaucuuuauuaaa

SEQ ID NO: 2937 - DNA, 23 bp, Artificial sequence
  Synthetic oligonucleotide
  misc_feature (2)..(23): basese at these positions are RNA
tgacagggucucccgcugcaggc

SEQ ID NO: 2938 - DNA, 23 bp, Artificial sequence
  Synthetic oligonucleotide
  misc_feature (2)..(23): basese at these positions are RNA
tagggucucccgcugcaggcugc

SEQ ID NO: 2939 - DNA, 23 bp, Artificial sequence
  Synthetic oligonucleotide
  misc_feature (2)..(23): basese at these positions are RNA
tgcucgaaccagcucuugaggcg

SEQ ID NO: 2940 - RNA, 21 nt, Artificial sequence
  Synthetic oligonucleotide
gacccuaguuuaauaaagaua

SEQ ID NO: 2941 - RNA, 21 nt, Artificial sequence
  Synthetic oligonucleotide
uaauaaagauucaccaaguua

SEQ ID NO: 2942 - RNA, 21 nt, Artificial sequence
  Synthetic oligonucleotide
cugcagcgggagacccuguca

SEQ ID NO: 2943 - RNA, 21 nt, Artificial sequence
  Synthetic oligonucleotide
agccugcagcgggagacccua

SEQ ID NO: 2944 - RNA, 21 nt, Artificial sequence
  Synthetic oligonucleotide
ccucaagagcugguucgagca

1. An oligomeric compound comprising a modified oligonucleotide consisting of 12 to 30 linked nucleosides wherein the nucleobase sequence of the modified oligonucleotide is at least 80% complementary to an equal length portion of an APOE RNA, and wherein the modified oligonucleotide comprises at least one modification selected from a modified sugar and a modified internucleoside linkage.

2. An oligomeric compound comprising a modified oligonucleotide consisting of 12 to 30 linked nucleosides, wherein the nucleobase sequence of the modified oligonucleotide comprises at least 12, at least 13, at least 14, at least 15, at least 16, at least 17, at least 18, at least 19, or at least 20 nucleobases of any of SEQ ID NOS: 20-2551 or 2934; wherein the modified oligonucleotide comprises at least one modification selected from a modified sugar and a modified internucleoside linkage.

3. An oligomeric compound comprising a modified oligonucleotide consisting of 12 to 30 linked nucleosides, wherein the nucleobase sequence of the modified oligonucleotide comprises at least 12, at least 13, at least 14, at least 15, at least 16, at least 17, at least 18, at least 19, at least 20, at least 21, at least 22, or at least 23 nucleobases of any of SEQ ID NOS: 2552-2742 or 2935-2944; wherein the modified oligonucleotide comprises at least one modification selected from a modified sugar and a modified internucleoside linkage.

4. An oligomeric compound comprising a modified oligonucleotide consisting of 12 to 30 linked nucleosides wherein the nucleobase sequence of the modified oligonucleotide is complementary to at least 8, at least 9, at least 10, at least 11, at least 12, at least 13, at least 14, at least 15, at least 16, at least 17, at least 18, at least 19, at least 20, or at least 21 contiguous nucleobases of:
an equal length portion of nucleobases 1155-1178 of SEQ ID NO: 2;
an equal length portion of nucleobases 1207-1230 of SEQ ID NO: 2; or
an equal length portion of nucleobases 1259-1295 of SEQ ID NO: 2;
wherein the modified oligonucleotide comprises at least one modification selected from a modified sugar and a modified internucleoside linkage.

5. An oligomeric compound comprising a modified oligonucleotide consisting of 12 to 30 linked nucleosides wherein the nucleobase sequence of the modified oligonucleotide is complementary to at least 8, at least 9, at least 10, at least 11, at least 12, at least 13, at least 14, at least 15, at least 16, at least 17, at least 18, at least 19, at least 20, or at least 21 contiguous nucleobases of:
an equal length portion of nucleobases 1135-1166 of SEQ ID NO: 2; or
an equal length portion of nucleobases 1255-1294 of SEQ ID NO: 2;
wherein the modified oligonucleotide comprises at least one modification selected from a modified sugar and a modified internucleoside linkage.

6. An oligomeric compound comprising a modified oligonucleotide consisting of 12 to 30 linked nucleosides wherein the nucleobase sequence of the modified oligonucleotide is complementary to at least 8, at least 9, at least 10, at least 11, at least 12, at least 13, at least 14, at least 15, at least 16, at least 17, at least 18, at least 19, at least 20, or at least 21 contiguous nucleobases of an equal length portion of nucleobases 1255-1295 of SEQ ID NO: 2, wherein the modified oligonucleotide comprises at least one modification selected from a modified sugar and a modified internucleoside linkage.

7. An oligomeric compound comprising a modified oligonucleotide consisting of 12 to 30 linked nucleosides and having a nucleobase sequence comprising at least 8, at least 9, at least 10, at least 11, at least 12, at least 13, at least 14, at least 15, at least 16, at least 17, at least 18, at least 19, at least 20, at least 21, at least 22 or at least 23 contiguous nucleobases of any of the nucleobase sequences of:
SEQ ID NOS: 70, 71, 169, 170, 447, 448, 543, 552, 553, 919, 1061, 1132, 1938, 1991, 2066, 2154, 2226, 2259, 2324, 2417, or 2486;
SEQ ID NOS: 460, 461, 462, 563, 564, 565, 566, 990, 1469, 1572, 1653, 1746, 1914, 1955, 2026, 2110, 2211, 2247, 2344, 2393, or 2481; or
SEQ ID NOS: 77, 475, 476, 477, 478, 479, 480, 481, 482, 483, 578, 579, 580, 581, 582, 622, 623, 624, 625, 626, 627, 1063, 1193, 1231, 1232, 1300, 1305, 1378, 1409, 1493, 1526, 1564, 1576, 1678, 1679, 1695, 1827, 1870, 1921, 1928, 1950, 1982, 2012, 2046, 2051, 2074, 2088, 2118, 2158, 2169, 2208, 2223, 2232, 2255, 2321, 2343, 2380, 2436, 2449, or 2451.

8. An oligomeric compound comprising a modified oligonucleotide consisting of 12 to 30 linked nucleosides and having a nucleobase sequence comprising at least 8, at least 9, at least 10, at least 11, at least 12, at least 13, at least 14, at least 15, at least 16, at least 17, at least 18, at least 19, at least 20, at least 21, at least 22 or at least 23 contiguous nucleobases of any of the nucleobase sequences of:
SEQ ID NOS: 2600, 2601, 2604, 2605, 2606, 2607, 2608, 2609, 2610, or 2613; or
SEQ ID NOS: 2720, 2721, 2722, 2726, 2727, 2729, 2730, 2731, 2732, 2733, 2734, 2735, 2736, 2737, 2738, or 2740.

9. An oligomeric compound comprising a modified oligonucleotide consisting of 12 to 30 linked nucleosides and having a nucleobase sequence comprising at least 8, at least 9, at least 10, at least 11, at least 12, at least 13, at least 14, at least 15, at least 16, at least 17, at least 18, at least 19, at least 20, at least 21, at least 22 or at least 23 contiguous nucleobases of any of the nucleobase sequences of SEQ ID NOs: 76, 77, 473, 474, 475, 476, 477, 478, 479, 480, 481, 482, 483, 576, 578, 579, 580, 581, 582, 622, 623, 624, 625, 626, 627, 1063, 1193, 1231, 1232, 1300, 1305, 1378, 1409, 1493, 1526, 1564, 1576, 1678, 1679, 1695, 1701, 1792, 1827, 1870, 1886, 1906, 1921, 1928, 1950, 1982, 2012, 2046, 2051, 2074, 2088, 2118, 2158, 2169, 2208, 2223, 2232, 2255, 2321, 2343, 2370, 2380, 2436, 2449, 2490, 2451, 2720, 2721, 2722, 2725, 2726, 2727, 2729, 2730, 2731, 2732, 2733, 2734, 2735, 2736, 2737, 2738, 2740, 2935 or 2936.

10. The oligomeric compound of any of claims 1-9, wherein the nucleobase sequence of the modified oligonucleotide is at least 80%, 85%, 90%, 95%, or 100% complementary to any of the nucleobase sequences of SEQ ID NOs: 1-6 when measured across the entire nucleobase sequence of the modified oligonucleotide.

11. The oligomeric compound of any of claims 1-10, wherein at least one nucleoside of the modified oligonucleotide is a modified nucleoside.

12. The oligomeric compound of claim 11, wherein at least one modified nucleoside of the modified oligonucleotide comprises a modified sugar moiety.

13. The oligomeric compound of claim 12, wherein the modified sugar moiety comprises a bicyclic sugar moiety.

14. The oligomeric compound of claim 13, wherein the bicyclic sugar moiety comprises a 2′-4′ bridge selected from —O—CH₂—; and —O—CH(CH₃)—.

15. The oligomeric compound of any of claims 11-14, wherein at least one modified nucleoside of the modified oligonucleotide comprises a non-bicyclic modified sugar moiety.

16. The oligomeric compound of claim 15, wherein at least one modified nucleoside of the modified oligonucleotide comprises a bicyclic sugar moiety having a 2′-4′ bridge and at least one nucleoside comprising a non-bicyclic modified sugar moiety.

17. The oligomeric compound of claim 15 or 16, wherein the non-bicyclic modified sugar moiety is a 2′-O(CH₂)₂—OCH₃ ribosyl modified sugar moiety, a 2′-OMe modified sugar moiety, or a 2′-F modified sugar moiety.

18. The oligomeric compound of any of claims 1-17, wherein the modified oligonucleotide comprises at least one modified nucleoside comprising a sugar surrogate.

19. The oligomeric compound of claim 18, wherein at least one modified nucleoside of the modified oligonucleotide comprises a sugar surrogate selected from morpholino and PNA.

20. The oligomeric compound of any of claims 1-19, wherein the modified oligonucleotide comprises at least one modified internucleoside linkage.

21. The oligomeric compound of claim 20, wherein each internucleoside linkage of the modified oligonucleotide is a modified internucleoside linkage.

22. The oligomeric compound of claim 20 or 21, wherein at least one internucleoside linkage is a phosphorothioate internucleoside linkage.

23. The oligomeric compound of claim 20 or 22, wherein the modified oligonucleotide comprises at least one phosphodiester internucleoside linkage.

24. The oligomeric compound of any of claim 20, 22, or 23, wherein each internucleoside linkage is independently selected from a phosphodiester internucleoside linkage or a phosphorothioate internucleoside linkage.

25. The oligomeric compound of any of claim 20 or 22-24, wherein at least 4, at least 5, at least 6, at least 7, at least 8, at least 9, at least 10, at least 11, at least 12, at least 13, at least 14, at least 15, at least 16, at least 17, at least 18, or at least 19 internucleoside linkages of the modified oligonucleotide are phosphorothioate internucleoside linkages.

26. The oligomeric compound of any of claims 20-25, wherein each internucleoside linkage is a phosphorothioate internucleoside linkage.

27. The oligomeric compound of any of claim 20 or 22-26, wherein the internucleoside linkage motif of the modified oligonucleotide is selected from: 5′-sssssssssssssssssss-3′, 5′-soossssssssssooss-3′, 5′-sooosssssssssssooss-3′, 5′-soossssssssssos-3′, 5′-ssooooooooooooooooooss-3′, 5′-ssooooooooooooooooss-3′, 5′-soooossssssssssooss-3′, 5′-sossssssssssssssoss-3′, 5′-soosssssssssooss-3′, and 5′-sooooossssssssssoss-3′; wherein each ‘o’ represents a phosphodiester internucleoside linkage and each ‘s’ represents a phosphorothioate internucleoside linkage.

28. The oligomeric compound of any of claims 1-27, wherein the modified oligonucleotide comprises a modified nucleobase.

29. The oligomeric compound of claim 28, wherein the modified nucleobase is a 5-methyl cytosine.

30. The oligomeric compound of any of claims 1-29, wherein the oligomeric compound comprises a modified oligonucleotide consisting of 12-22, 12-20, 14-18, 14-20, 15-17, 15-25, 16-20, 16-18, 18-22, 18-25, 18-20, 20-25, or 21-23 linked nucleosides, or a pharmaceutically acceptable salt thereof

31. The oligomeric compound of claim 30, which is a pharmaceutically acceptable salt comprising one or more cations selected from sodium, potassium, calcium, and magnesium.

32. The oligomeric compound of any of claims 1-31, wherein the modified oligonucleotide consists of 16 or 18 linked nucleosides.

33. The oligomeric compound of any of claims 1-31, wherein the modified oligonucleotide consists of 20 linked nucleosides.

34. The oligomeric compound of any of claims 1-31, wherein the modified oligonucleotide consists of 21 linked nucleosides.

35. The oligomeric compound of any of claims 1-31, wherein the modified oligonucleotide consists of 23 linked nucleosides.

36. The oligomeric compound of any of claims 1-35, wherein the oligomeric compound is an RNase H compound.

37. The oligomeric compound of claim 36, wherein the modified oligonucleotide is a gapmer.

38. The oligomeric compound of any of claims 1-37, wherein the modified oligonucleotide has a sugar motif comprising:
a 5′-region consisting of 1-6 linked 5′-region nucleosides;
a central region consisting of 6-10 linked central region nucleosides; and
a 3′-region consisting of 1-6 linked 3′-region nucleosides;
wherein the 3′-most nucleoside of the 5′-region and the 5′-most nucleoside of the 3′-region comprise modified sugar moieties, and
each of the central region nucleosides is selected from a nucleoside comprising a 2′-β-D-deoxyribosyl sugar moiety and a nucleoside comprising a 2′-substituted sugar moiety, wherein the central region comprises at least six nucleosides comprising a 2′-β-D-deoxyribosyl sugar moiety and no more than two nucleosides comprising a 2′-substituted sugar moiety.

39. The oligomeric compound of any of claim 1-34 or 36-37, wherein the modified oligonucleotide has a sugar motif comprising:
a 5′-region consisting of 1-6 linked 5′-region nucleosides;
a central region consisting of 6-10 linked central region nucleosides; and
a 3′-region consisting of 1-6 linked 3′-region nucleosides; wherein
each of the 5′-region nucleosides and each of the 3′-region nucleosides comprises a modified sugar moiety and each of the central region nucleosides comprises a 2′-β-D-deoxyribosyl sugar moiety.

40. The oligomeric compound of claim 39, wherein the modified oligonucleotide has a sugar motif comprising:
a 5′-region consisting of 5 linked 5′-region nucleosides;
a central region consisting of 10 linked central region nucleosides; and
a 3′-region consisting of 5 linked 3′-region nucleosides; wherein
each of the 5′-region nucleosides and each of the 3′-region nucleosides comprises either a cEt modified sugar moiety or a 2′-O(CH₂)₂—OCH₃ ribosyl modified sugar moiety, and each of the central region nucleosides comprises a 2′-β-D-deoxyribosyl sugar moiety.

41. The oligomeric compound of claim 39 or claim 40, wherein the modified oligonucleotide has a sugar motif comprising:
a 5′-region consisting of 5 linked 5′-region nucleosides;
a central region consisting of 10 linked central region nucleosides; and
a 3′-region consisting of 5 linked 3′-region nucleosides; wherein
each of the 5′-region nucleosides and each of the 3′-region nucleosides comprises a 2′-O(CH₂)₂—OCH₃ ribosyl modified sugar moiety, and each of the central region nucleosides comprises a 2′-β-D-deoxyribosyl sugar moiety.

42. The oligomeric compound of any of claims 1-35, wherein the oligomeric compound is an RNAi agent.

43. The oligomeric compound of any of claims 1-42, wherein the oligomeric compound comprises an antisense RNAi oligonucleotide comprising a targeting region comprising at least 15 contiguous nucleobases, wherein the targeting region is at least 90% complementary to an equal-length portion of an APOE RNA.

44. The oligomeric compound of claim 43, wherein the targeting region of the antisense RNAi oligonucleotide is at least 95% complementary or is 100% complementary to the equal length portion of an APOE RNA.

45. The oligomeric compound of any of claims 43-44, wherein the targeting region of the antisense RNAi oligonucleotide comprises at least 19, 20, 21, or 25 contiguous nucleobases.

46. The oligomeric compound of any of claims 43-45, wherein the APOE RNA has the nucleobase sequence of any of SEQ ID NOs: 1-6.

47. The oligomeric compound of any of claims 43-46, wherein at least one nucleoside of the antisense RNAi oligonucleotide comprises a modified sugar moiety selected from: 2′-F, 2′-O(CH₂)₂—OCH₃, 2′-NMA, LNA, and cEt; or a sugar surrogate selected from GNA, and UNA.

48. The oligomeric compound of any of claims 43-47, wherein each nucleoside of the antisense RNAi oligonucleotide comprises a modified sugar moiety or a sugar surrogate.

49. The oligomeric compound of any of claims 43-48, wherein at least 80%, at least 90%, or 100% of the nucleosides of the antisense RNAi oligonucleotide comprises a modified sugar moiety selected from 2′-F and 2′-OMe.

50. The oligomeric compound of any of claims 43-49, comprising a stabilized phosphate group attached to the 5′ position of the 5′-most nucleoside of the antisense RNAi oligonucleotide.

51. The oligomeric compound of claim 50, wherein the stabilized phosphate group comprises a cyclopropyl phosphonate or an (E)-vinyl phosphonate.

52. The oligomeric compound of any of claims 1-51, wherein the oligomeric compound is a single-stranded oligomeric compound.

53. The oligomeric compound of any of claims 1-52, consisting of the modified oligonucleotide or the RNAi antisense oligonucleotide.

54. The oligomeric compound of any of claims 1-53, comprising a conjugate group comprising a conjugate moiety and a conjugate linker.

55. The oligomeric compound of claim 54, wherein the conjugate linker consists of a single bond.

56. The oligomeric compound of claim 54, wherein the conjugate linker is cleavable.

57. The oligomeric compound of claim 54, wherein the conjugate linker comprises 1-3 linker-nucleosides.

58. The oligomeric compound of any of claims 54-57, wherein the conjugate group is attached to the 5′-end of the modified oligonucleotide or the antisense RNAi oligonucleotide.

59. The oligomeric compound of any of claims 54-57, wherein the conjugate group is attached to the 3′-end of the modified oligonucleotide or the antisense RNAi oligonucleotide.

60. The oligomeric compound of any of claims 1-59, comprising a terminal group.

61. The oligomeric compound of any of claim 1-56 or 58-60, wherein the oligomeric compound does not comprise linker-nucleosides.

62. An oligomeric duplex, comprising a first oligomeric compound comprising an antisense RNAi oligonucleotide of any of claims 43-61 and a second oligomeric compound comprising a sense RNAi oligonucleotide consisting of 17 to 30 linked nucleosides, wherein the nucleobase sequence of the sense RNAi oligonucleotide comprises an antisense-hybridizing region comprising least 15 contiguous nucleobases wherein the antisense-hybridizing region is at least 90% complementary to an equal length portion of the antisense RNAi oligonucleotide.

63. The oligomeric duplex of claim 62, wherein the sense RNAi oligonucleotide consists of 18-25, 20-25, or 21-23 linked nucleosides.

64. The oligomeric duplex of claim 62, wherein the sense RNAi oligonucleotide consists of 21 or 23 linked nucleosides.

65. The oligomeric duplex of any of claims 62-64, wherein 1-4 3′-most nucleosides of the antisense or the sense RNAi oligonucleotide are overhanging nucleosides.

66. The oligomeric duplex of any of claims 62-65, wherein 1-4 5′-most nucleosides of the antisense or sense RNAi oligonucleotide are overhanging nucleosides.

67. The oligomeric duplex of any of claims 62-64, wherein the duplex is blunt ended at the 3′-end of the antisense RNAi oligonucleotide.

68. The oligomeric duplex of any of claims 62-64, wherein the duplex is blunt ended at the 5′-end of the antisense RNAi oligonucleotide.

69. The oligomeric duplex of any of claims 62-68, wherein at least one nucleoside of the sense RNAi oligonucleotide comprises a modified sugar moiety selected from: 2′-F, 2′-OMe, LNA, cEt, or a sugar surrogate selected from GNA, and UNA.

70. The oligomeric duplex of claim 69, wherein each nucleoside of the sense RNAi oligonucleotide comprises a modified sugar moiety or a sugar surrogate.

71. The oligomeric duplex of claim 70, wherein at least 80%, at least 90%, or 100% of the nucleosides of the sense RNAi oligonucleotide comprises a modified sugar moiety selected from 2′-F and 2′-OMe.

72. The oligomeric duplex of any of claims 62-71, wherein at least one nucleoside of the sense RNAi oligonucleotide comprises a modified nucleobase.

73. The oligomeric duplex of any of claims 62-72, wherein at least one internucleoside linkage of the sense RNAi oligonucleotide is a modified internucleoside linkage.

74. The oligomeric duplex of claim 73, wherein at least one internucleoside linkage of the sense RNAi oligonucleotide is a phosphorothioate internucleoside linkage.

75. The oligomeric duplex of any of claims 62-74, wherein the oligomeric duplex comprises 1-5 abasic sugar moieties attached to one or both ends of the antisense or sense RNA oligonucleotide.

76. The oligomeric duplex of any of claims 62-75, consisting of the antisense RNAi oligonucleotide and the sense RNAi oligonucleotide.

77. The oligomeric duplex of any of claims 62-75, wherein the second oligomeric compound comprises a conjugate group comprising a conjugate moiety and a conjugate linker.

78. The oligomeric duplex of claim 77, wherein the conjugate linker consists of a single bond.

79. The oligomeric duplex of claim 78, wherein the conjugate linker is cleavable.

80. The oligomeric duplex of claim 78, wherein the conjugate linker comprises 1-3 linker-nucleosides.

81. The oligomeric duplex of any of claims 78-80, wherein the conjugate group is attached to the 5′-end of the sense RNAi oligonucleotide.

82. The oligomeric duplex of any of claims 78-80, wherein the conjugate group is attached to the 3′-end of the sense RNAi oligonucleotide.

83. The oligomeric duplex of any of claims 78-80, wherein the conjugate group is attached via the 2′ position of a ribosyl sugar moiety at an internal position of the sense RNAi oligonucleotide.

84. The oligomeric compound of any of claims 54-59 or the oligomeric duplex of any of claims 77-83, wherein at least one conjugate group comprises a C₁₆ alkyl group.

85. The oligomeric duplex of claim 62, wherein the second oligomeric compound comprises a terminal group.

86. An antisense agent comprising an antisense compound, wherein the antisense compound is the oligomeric compound of any of claims 1-61.

87. The antisense agent of claim 86, wherein the antisense agent is the oligomeric duplex of any of claims 62-85.

88. The antisense agent of claim 86 or claim 87, wherein the antisense agent is:
i) an RNase H agent capable of reducing the amount of APOE nucleic acid through the activation of RNase H; or
ii) an RNAi agent capable of reducing the amount of APOE nucleic acid through the activation of RISC/Ago2.

89. The antisense agent of any of claims 86-88, wherein the antisense agent comprises a conjugate group, wherein the conjugate group comprises a cell-targeting moiety.

90. A chirally enriched population of oligomeric compounds of any of claims 1-61, wherein the population is enriched for modified oligonucleotides comprising at least one particular phosphorothioate internucleoside linkage having a particular stereochemical configuration.

91. The chirally enriched population of claim 90, wherein the population is enriched for modified oligonucleotides comprising at least one particular phosphorothioate internucleoside linkage having the (Sp) or (Rp) configuration.

92. The chirally enriched population of claim 90, wherein the population is enriched for modified oligonucleotides having a particular, independently selected stereochemical configuration at each phosphorothioate internucleoside linkage.

93. The chirally enriched population of claim 90, wherein the population is enriched for modified oligonucleotides having the (Rp) configuration at one particular phosphorothioate internucleoside linkage and the (Sp) configuration at each of the remaining phosphorothioate internucleoside linkages.

94. The chirally enriched population of claim 90, wherein the population is enriched for modified oligonucleotides having at least 3 contiguous phosphorothioate internucleoside linkages in the Sp, Sp, and Rp configurations, in the 5′ to 3′ direction.

95. A population of oligomeric compounds of any of claims 1-61, wherein all of the phosphorothioate internucleoside linkages of the modified oligonucleotide are stereorandom.

96. A pharmaceutical composition comprising an oligomeric compound of any of claims 1-61, an oligomeric duplex of any of claims 62-85, an antisense agent of any of claims 86-89, or a population of any of claims 90-95, and a pharmaceutically acceptable carrier or diluent.

97. The pharmaceutical composition of claim 96, wherein the pharmaceutically acceptable diluent is artificial cerebral spinal fluid (aCSF), sterile saline, or PBS.

98. The pharmaceutical composition of claim 97, wherein the pharmaceutical composition consists essentially of the modified oligonucleotide, the oligomeric duplex, the antisense agent, or the population and PBS or aCSF.

99. A method comprising administering to a subject an oligomeric compound of any of claims 1-61, an oligomeric duplex of any of claims 62-85, an antisense agent of any of claims 86-89, a population of any of claims 90-95, or a pharmaceutical composition of any of claims 96-98.

100. A method of treating a disease associated with APOE comprising administering to a subject having or at risk for developing a disease associated with APOE a therapeutically effective amount of an oligomeric compound of any of claims 1-61, an oligomeric duplex of any of claims 62-85, an antisense agent of any of claims 86-89, a population of any of claims 90-95, or a pharmaceutical composition according to any of claims 96-98; and thereby treating the disease associated with APOE.

101. The method of claim 100, wherein the APOE-associated disease is Alzheimer's Disease.

102. The method of any of claims 99-101, wherein at least one symptom or hallmark of the APOE-associated disease is ameliorated.

103. The method of claim 102, wherein the symptom or hallmark is cognitive impairment, progressive memory loss, behavioral abnormality, dementia, difficulty performing daily activities, amyloid plaques, neurofibrillary tangles, or neuroinflammation.

104. The method of any of claims 100-103, wherein administering an oligomeric compound of any of claims 1-61, an oligomeric duplex of any of claims 62-85, an antisense agent of any of claims 86-89, a population of any of claims 90-95, or a pharmaceutical composition according to any of claims 96-98 reduces cognitive impairment, behavioral abnormality, dementia, difficulty performing daily activities, amyloid plaques, neurofibrillary tangles, or neuroinflammation, or slows memory loss in the subject.

105. The method of any of claims 99-104, wherein the subject is human.

106. A method of reducing expression of APOE in a cell comprising contacting the cell with an oligomeric compound of any of claims 1-61, an oligomeric duplex of any of claims 62-85, an antisense agent of any of claims 86-89, a population of any of claims 90-95, or a pharmaceutical composition according to any of claims 96-98.

107. The method of claim 106, wherein the cell is a neuron or a glial cell, optionally wherein the cell is an astrocyte or microglial cell.

108. The method of claim 106 or claim 107, wherein the cell is a human cell.

109. Use of an oligomeric compound of any of claims 1-61, an oligomeric duplex of any of claims 62-85, an antisense agent of any of claims 86-89, a population of any of claims 90-95, or a pharmaceutical composition according to any of claims 96-98 for treating a disease associated with APOE.

110. Use of an oligomeric compound of any of claims 1-61, an oligomeric duplex of any of claims 62-85, an antisense agent of any of claims 86-89, a population of any of claims 90-95, or a pharmaceutical composition according to any of claims 96-98 in the manufacture of a medicament for treating a disease associated with APOE.

111. The use of claim 109 or claim 110, wherein the APOE-associated disease is Alzheimer's Disease.
